(19) United States
(12) Patent Application Publication
(10) Pub. No.: US 2020/0246396 A1
(43) Pub. Date: Aug. 6, 2020

(54) INHIBITION OF COLONIC GROUP 3 INNATE LYMPHOID CELLS

(71) Applicants: President and Fellows of Harvard College, Cambridge, MA (US); Children's Medical Center Corporation, Boston, MA (US)

(72) Inventors: Neeraj K. Surana, Boston, MA (US); Dennis Kasper, Brookline, MA (US)

(21) Appl. No.: 16/312,815

(22) PCT Filed: Jun. 22, 2017
(86) PCT No.: PCT/US2017/038680

§ 371 Date: Dec. 21, 2018

Related U.S. Application Data
(60) Provisional application No. 62/353,384, filed on Jun. 22, 2016.

(51) Int. Cl. A61K 35/741; A23L 33/135; A61P 1/00

(52) U.S. Cl. CPC A61K 35/741; A61P 1/00; A23L 33/135

(57) ABSTRACT

In certain aspects, described herein are methods, bacteria, and compositions for the reduction of the amount, activity and/or proliferation of colonic group 3 innate lymphoid cells (ILC3s) and for the treatment and/or prevention of diseases associated with pathological immune responses, such as inflammatory bowel diseases.

### RELATED APPLICATIONS

[0001] This application is a § 371 national-stage application based on PCT/US17/38680 filed Jun. 22, 2017 which claims the benefit of priority to U.S. Provisional Application No. 62/353,384 filed on Jun. 22, 2016, which is hereby incorporated in its entirety.

### GOVERNMENT INTEREST

[0002] This invention was made with government support under Grant Number AI108690, awarded by the National Institutes of Health. The government has certain rights in the invention.

### SEQUENCE LISTING

[0003] The instant application contains a Sequence Listing which has been submitted electronically in ASCII format and is hereby incorporated by reference in its entirety. Said ASCII copy, created on Aug. 23, 2017, is named HMV-26625_SL.txt and is 7,080,032 bytes in size.

### BACKGROUND

[0004] Inflammatory bowel disease (IBD) is a group of inflammatory conditions of the colon and small intestine. The two most common forms of IBD, Crohn's disease and ulcerative colitis, affect over 2.5 million people of European ancestry, with rising prevalence in other populations. Treatments for IBD include diet and lifestyle changes, drug therapy, and surgery. Currently, there is no cure for IBD. Instead, the goal of treatment focuses on attaining remission. Thus, there is a great need for improved compositions and methods for the treatment of IBD and other autoimmune and inflammatory conditions.

### SUMMARY

[0005] In certain aspects, provided herein is a method of reducing the amount, activity (e.g., IL-17 secretion) and/or proliferation of colonic group 3 innate lymphoid cells (ILC3s) in a subject. In certain embodiments, the method comprises administering to the subject a composition comprising a bacteria of the family Lachnospiraceae. In some embodiments, the subject suffers from or is predisposed to an immune disorder, such as an inflammatory bowel disease, psoriasis, or asthma. In some embodiments, the immune disorder is an inflammatory bowel disease, such as Crohn's disease, ulcerative colitis, irritable bowel syndrome, microscopic colitis, lymphocytic-plasmocytic enteritis, coeliac disease, collagenous colitis, lymphocytic colitis and eosinophilic enterocolitis, indeterminate colitis, infectious colitis, pseudomembranous colitis, ischemic inflammatory bowel disease or Behcet's disease. In some embodiments, the inflammatory bowel disease is ulcerative colitis. In some embodiments of the methods described herein, the administration of the composition reduces the number of IL-17 expressing colonic ILC3s in the subject.

[0006] In some embodiments of the methods described herein, the composition administered to the subject further comprises a pharmaceutically acceptable carrier. In some embodiments, the composition is administered orally. In some embodiments of the methods and compositions described herein, the composition is a food product supplemented with the bacteria. In some embodiments, the composition is administered rectally.

[0007] In some embodiments, the methods described herein further comprise administering a pre-biotic and/or administering an antibiotic. In some embodiments, the method comprises administering an antibiotic to the subject prior to the administration of the composition.

[0008] In certain aspects, provided herein is a pharmaceutical composition comprising a bacteria of the family Lachnospiraceae and a pharmaceutically acceptable carrier. In some embodiments, the composition is formulated for oral administration. In some embodiments, the composition is formulated for rectal administration. In some embodiments, the composition further comprises a pre-biotic. In some embodiments of the methods and compositions described herein, the composition is a food product supplemented with the bacteria.

[0009] In some embodiments of the methods and compositions described herein, the bacteria of the family Lachnospiraceae are of the genus Acetitomaculum, Anaerofilum, Anaerostipes, Blautia, Butyrivibrio, Catenibacterium, Catonella, Clostridium, Coprococcus, Dorea, Epulopiscium, Johnsonella, Lachnobacterium, Lachnospira, Oribacterium, Pseudobutyrivibrio, Roseburia, Ruminococcus, Shuttleworthia or Sporobacterium. In some embodiments of the methods and compositions described herein, at least 10%, 15%, 20%, 25%, 30%, 35%, 40%, 45%, 50%, 55%, 60%, 65%, 70%, 75%, 80%, 85%, 90%, 95%, 96%, 97%, 98%, or 99% of the bacteria in the composition are of the family Lachnospiraceae. In some embodiments of the methods and compositions described herein, the bacteria are live, replication competent bacteria.

[0010] In some aspects provided herein are bacteria and compositions (e.g., pharmaceutical compositions) comprising said bacteria, wherein the bacteria's 16s DNA has a sequence that is at least 95%, at least 99%, at least 99.5%, or at least 99.9% identical to SEQ ID NO: 1. In some embodiments, the bacteria's 16s DNA has a sequence that is identical to SEQ ID NO: 1. In some aspects, provided herein are bacteria having the genome comprising a sequence that is at least 90%, at least 95%, at least 99%, at least 99.5%, or at least 99% identical to SEQ ID NO: 2. In some embodiments, the genome sequence is identical to SEQ ID NO: 2. The bacteria (i.e., bacteria comprising 16s DNA having a sequence that is at least partially identical to SEQ ID NO:1 and/or having genome sequence that is at least partially identical to SEQ ID NO: 2) may comprise at least 10%, 15%, 20%, 25%, 30%, 35%, 40%, 45%, 50%, 55%, 60%, 65%, 70%, 75%, 80%, 85%, 90%, 95%, 96%, 97%, 98%, or 99% of the bacteria in the composition. In some embodiments, the bacteria have undergone directed evolution. In some embodiments, the bacteria are not naturally occurring. In some embodiments, the composition formulated for oral administration (e.g., the composition may be a food product). In some embodiments, the composition is formulated for rectal administration. In some embodiments, the bacteria are live, replication competent bacteria. The composition may comprise a pre-biotic or an antibiotic.

[0011] Provided herein are methods of treating and/or preventing a condition (e.g., an immune disorder, such as an inflammatory bowel disease, psoriasis, or asthma) by administering bacteria or compositions comprising said bacteria to the subject. In some embodiments, the condition is an inflammatory bowel disease, such as Crohn's disease, ulcerative colitis, irritable bowel syndrome, microscopic colitis, lymphocytic-plasmocytic enteritis, coeliac disease, collagenous colitis, lymphocytic colitis and eosinophilic enterocolitis, indeterminate colitis, infectious colitis, pseudomembranous colitis, ischemic inflammatory bowel disease or Behcet's disease. In some embodiments, the composition reduces the amount, activity and/or proliferation of colonic group 3 innate lymphoid cells (ILC3s) in a subject.

[0012] Provided herein are compositions and methods related to reducing the amount, activity and/or proliferation of colonic group 3 innate lymphoid cells (ILC3s) in a subject by administering to the subject bacteria disclosed herein or a composition comprising said bacteria. In some embodiments, the subject suffers from or is predisposed to an inflammatory bowel disease (e.g., Crohn's disease, ulcerative colitis, irritable bowel syndrome, microscopic colitis, lymphocytic-plasmocytic enteritis, coeliac disease, collagenous colitis, lymphocytic colitis and eosinophilic enterocolitis, indeterminate colitis, infectious colitis, pseudomembranous colitis, ischemic inflammatory bowel disease or Behcet's disease), psoriasis, and/or asthma.

[0013] The bacteria and/or compositions disclosed herein may be administered orally or rectally. In some embodiments, the methods disclosed herein further comprise administering a pre-biotic or an antibiotic to the subject. The antibiotic or pre-biotic may be administered prior and/or after administration of the bacterium or composition.

[0014] Provided herein are methods of identifying bacteria that convey disease resistance and/or disease susceptibility by determining a first microbiome profile for a disease-susceptible subject and/or a disease-resistant subject, co-housing the disease-susceptible subject with the disease-resistant subject for a period of time sufficient for the disease-susceptible subject to acquire disease resistance, and, after co-housing, determining a second microbiome profile for the disease-susceptible subject and/or a disease-resistant subject. In some embodiments, the method comprises comparing the first microbiome profile of the disease-susceptible subject with the second microbiome profile of the disease-susceptible subject to identify operational taxonomic units (OTUs) of bacteria that are more prevalent in the second microbiome profile of the disease-susceptible subject than the first microbiome profile of the disease-susceptible subject. Operational taxonomic units (OTUs) of bacteria that are more prevalent in the second microbiome profile of the disease-susceptible subject than the first microbiome profile may confer disease-resistance. In some embodiments, the method comprises comparing the first microbiome profile of the disease-susceptible subject with the second microbiome profile to identify operational taxonomic units (OTUs) of bacteria that are less prevalent in the second microbiome profile of the disease-susceptible subject than the first microbiome profile of the disease-susceptible subject. Operational taxonomic units (OTUs) of bacteria that are less prevalent in the second microbiome profile of the disease-susceptible subject than the first microbiome of the disease-susceptible subject profile may confer disease susceptibility.

[0015] In some embodiments, the method comprises comparing the first microbiome profile of the disease-resistant subject with the second microbiome profile of the disease-resistant subject to identify operational taxonomic units (OTUs) of bacteria that are more prevalent in the second microbiome profile of the disease-resistant subject than the first microbiome profile of the disease-resistant subject. Operational taxonomic units (OTUs) of bacteria that are more prevalent in the second microbiome profile of the disease-resistant subject than the first microbiome profile of the disease-resistant subject may confer disease susceptibility. In some embodiments, the method comprises comparing the first microbiome profile of the disease-resistant subject with the second microbiome profile of the disease-resistant subject to identify operational taxonomic units (OTUs) of bacteria that are less prevalent in the second microbiome profile of the disease-resistant subject than the first microbiome profile of the disease-resistant subject. Operational taxonomic units (OTUs) of bacteria that are less prevalent in the second microbiome profile of the disease-resistant subject than the first microbiome of the disease-resistant subject profile may confer disease resistance.

[0016] In some aspects, provided herein are methods of identifying bacteria that convey disease-susceptibility and/or disease-resistance by determining a first microbiome profile for a disease-resistant subject, co-housing the disease-resistant subject with a disease-susceptible subject for a period of time sufficient for the disease-resistant subject to acquire disease susceptibility, and, after co-housing, determining a second microbiome profile for the disease-resistant subject. In some embodiments, the method comprises comparing the first microbiome profile of the disease-resistant subject with the second microbiome profile of the disease-resistant subject to identify operational taxonomic units (OTUs) of bacteria that are more prevalent in the second microbiome profile of the disease-resistant subject than the first microbiome profile of the disease-resistant subject. Operational taxonomic units (OTUs) of bacteria that are more prevalent in the second microbiome profile for the disease-resistant subject than the first microbiome profile of the disease-resistant subject may confer disease susceptibility. In some embodiments, the method comprises comparing the first microbiome profile of the disease-resistant subject with the second microbiome profile of the disease-resistant subject to identify operational taxonomic units (OTUs) of bacteria that are less prevalent in the second microbiome profile of the disease-resistant subject than the first microbiome profile of the disease-resistant subject. Operational taxonomic units (OTUs) of bacteria that are less prevalent in the second microbiome profile for the disease-resistant subject than the first microbiome profile for the disease-resistant subject may confer disease resistance.

[0017] In some embodiments, the method comprises comparing the first microbiome profile of the disease-susceptible subject with the second microbiome profile of the disease-susceptible subject to identify operational taxonomic units (OTUs) of bacteria that are more prevalent in the second microbiome profile of the disease-susceptible subject than the first microbiome profile of the disease-susceptible subject. Operational taxonomic units (OTUs) of bacteria that are more prevalent in the second microbiome profile of the disease-susceptible subject than the first microbiome profile of the disease-susceptible subject may confer disease resistance. In some embodiments, the method comprises comparing the first microbiome profile of the disease-susceptible subject with the second microbiome profile to identify operational taxonomic units (OTUs) of bacteria that are less prevalent in the second microbiome profile of the disease-susceptible subject than the first microbiome profile of the disease-susceptible subject. Operational taxonomic units (OTUs) of bacteria that are less prevalent in the second microbiome profile of the disease-susceptible subject than the first microbiome of the disease-susceptible subject profile may confer disease susceptibility. In some embodiments, the disease is inflammatory bowel disease (e.g., Crohn's disease, ulcerative colitis, irritable bowel syndrome, microscopic colitis, lymphocytic-plasmocytic enteritis, coeliac disease, collagenous colitis, lymphocytic colitis and eosinophilic enterocolitis, indeterminate colitis, infectious colitis, pseudomembranous colitis, ischemic inflammatory bowel disease or Behcet's disease), psoriasis, or asthma.

[0018] The subject may be a human or a non-human animal, such as a rodent (e.g., mouse or rat). In some embodiments, at least a portion of the subject's microbiome comprises bacteria from another species. For example, the subject may be a mouse, and have a microbiome comprising bacteria naturally occurring in humans.

[0019] The period of time may be any time needed to exchange microbiome bacteria between subjects. In some embodiments, the period of time is any time needed to confer disease resistance or disease susceptibility. For example, the time may be 12 hours, 24 hours, 36 hours, 48 hours, 3 days, 5 days, 1 week, 2 weeks, 3 weeks, 6 weeks, or 12 weeks.

[0020] In some embodiments, the compositions described herein (i.e., compositions comprising a bacterium disclosed herein) further comprise additional bacteria (e.g. bacteria of a different species or genus). The additional bacteria may be of the family Lachnospiraceae. In some embodiments, the additional bacteria of the family Lachnospiraceae are of the genus Acetitomaculum, Anaerofilum, Anaerostipes, Blautia, Butyrivibrio, Catenibacterium, Catonella, Clostridium, Coprococcus, Dorea, Epulopiscium, Johnsonella, Lachnobacterium, Lachnospira, Oribacterium, Pseudobutyrivibrio, Roseburia, Ruminococcus, Shuttleworthia or Sporobacterium.

### BRIEF DESCRIPTION OF THE DRAWINGS

[0021] FIG. 1 is a mouse survival curve showing that mice having normal mouse microbiota (MMb) are sensitive to dextan sodium sulfate (DSS) colitis, while mice having normal human microbiota (HMb) are resistant to DSS colitis. SPF: Specific Pathogen Free; GF: Germ Free.

[0022] FIG. 2 includes two panels (A and B) and shows the prevalence of several major colonic lymphoid (panel A) and myeloid (panel B) cell subsets in MMb and HMb mice.

[0023] FIG. 3 shows the number of colonic NKp46+ group 3 innate lymphoid cells (ILC3s) in MMb and HMb mice.

[0024] FIG. 4 depicts a schematic of the exemplary systems-based approach disclosed herein to identify immunomodulatory bacteria.

[0025] FIG. 5 includes two panels (A and B), each of which depict survival curves showing that the relationship between the duration of co-housing and DSS susceptibility. X:Y denotes that mouse type y was co-housed with mouse type x.

[0026] FIG. 6 depicts a principle coordinate analysis of 16S rDNA sequences from the feces of MMb, specific pathogen-free (SPF), and HMb mice.

[0027] FIG. 7 depicts the principle coordinate analysis of 16S rDNA sequences from the feces MMb, SPF, and HMb mice (as shown in FIG. 6), as well as HMb and MMb mice that were co-housed with each other for 1 day and then singly housed for another 13 days (d14). X:Y denotes that mouse type y was co-housed with mouse type x.

[0028] FIG. 8 is a table listing the total number of different operational taxonomic units (OTUs) present in each pairwise comparison of mouse types, and the number of differentially abundant taxa (identified by LEfSe) for each comparison.

[0029] FIG. 9 shows the relative abundance of Lachnospiraceae in the indicated mouse types.

[0030] FIG. 10 shows that culturing feces from HMb mice on semi-selective media resulted in a ˜5-fold enrichment of Lachnospiraceae.

[0031] FIG. 11 shows the number of NKp46+ ILC3s in MMb mice given the cultivable fraction from either MMb or HMb feces.

[0032] FIG. 12 includes two panels (A and B) showing the number of IL-22+(Panel A) and IL-17+(Panel B) NKp46+ ILC3s in MMb and HMb mice.

[0033] FIG. 13 is a survival curve showing that MMb mice given the cultivable fraction from HMb feces (circle) have less DSS-induced mortality then MMb mice administered the cultivatable fraction from MMb feces (square).

[0034] FIG. 14 shows MMb mice have more severe colitis than HMb mice. Weight change and survival of GF (red, square, n=12), MMb (n=10), HMb (green upside-down triangle; n=12), and SPF (n=12) mice subjected to DSS-induced colitis. Mean±SEM is depicted. Histologic assessment of disease severity in the colon at days 5 and 10 after induction of colitis in MMb, HMb, and SPF mice. Bars depict the mean+SEM.

[0035] FIG. 15 shows microbial pedigree analysis reveals that the bacterial family Lachnospiraceae is associated with survival from colitis. Survival of mice following DSS-induced colitis. A. MMb (blue; n=4) and HMb (green; n=4) mice were co-housed for 3 weeks before induction of colitis. Dashed and solid lines depict mice that were and were not co-housed, respectively. B. MMb mice were co-housed with HMb mice for 1 or 3 days (n=8 per group). C. HMb mice were co-housed with MMb mice for 1 (blue) or 3 days (red). Non-co-housed HMb mice are depicted in green (n=8 per group). D. A principal-components analysis depicting the fecal microbiota of MMb, SPF, HMb, MMb^{HMb-1d}, and HMb^{MMb-1d} mice. E. The different pairwise comparisons used as “family pedigrees,” with 4 mice included per group; the total number of operational taxonomic units (OTUs) in all 8 mice per pair; and the differentially abundant taxa, which were identified with LEfSe. The only taxon that was identified in all 4 comparisons was the family Lachnospiraceae. F. The relative abundance of Lachnospiraceae in each of the indicated microbiotas is shown.

[0036] FIG. 16. Clostridium immunis protects MMb mice from colitis. A. Relative abundance of bacterial families present in HMb feces before and after culture. B. Survival of MMb mice orally receiving MMb cx (blue, square; n=9) or HMb cx (green, triangle; n=9) and subjected to DSS-induced colitis. Data are pooled from 2 independent experiments. C. Relative abundance of Lachnospiraceae in a subset of the mice depicted in panel B. The fecal microbiota was assessed before gavage with any material (MMb; n=9) or 1 week after gavage with MMb cx (n=5) or HMb cx (n=4). The post-gavage samples represent day 0 of the DSS colitis experiment. The bars represent the mean+SEM. D. Survival of MMb mice orally receiving Clostridium innocuum (green, triangle; n=5) or Clostridium immunis (blue, square; n=5) and subjected to DSS-induced colitis.

[0037] FIG. 17 shows individual microbiome-wide association studies reveal a large number of differentially abundant taxa. LEfSe was used to identify differentially abundant taxa in the fecal microbiota of various mice. The red and green colors reflect taxa that are more abundant in that particular group. Taxa that are colored yellow did not statistically differ in abundance between groups. Each ring of the cladogram represents a different taxonomic level, starting with kingdom in the center and ending with genus in the outer ring. A. Comparison of HMb and MMb. B. Comparison of MMb and SPF. C. Comparison of MMb and MMb^{HMb-1d}. D. Comparison of HMb and HMb^{MMb-1d}. The family Lachnospiraceae is indicated by the symbols c4 (A), a6 (B), al (C), and a9 (D).

[0038] FIG. 18. shows that culture of MMb feces on semi-selective medium does not enrich for Lachnospiraceae. The relative abundance of bacterial families present in MMb feces before and after culture is shown.

[0039] FIG. 19 shows MMb mice given MMb cx or HMb cx have distinct microbiotas. Principal-components analysis of the fecal microbiota of MMb mice before and after gavage with MMb cx or HMb cx is shown. The arrow indicates an MMb mouse that received HMb cx but died after being challenged with DSS.

[0040] FIG. 20 shows HMb cx bacterial consortium is sufficient to protect mice from colitis-associated death. The survival of GF mice (n=10) orally receiving HMb cx and subjected to DSS-induced colitis is shown.

[0041] FIG. 21 shows FAME analysis demonstrates that C. immunis is different than the type strain of C. symbiosum. GC analysis of fatty acid methyl esters (FAME analysis) was performed by MIDI Labs. The identification based on this analysis was Clostridium symbiosum group B, but the type strain of C. symbiosum is in group A. Given this difference, it is clear that the newly identified species is distinct from C. symbiosum. The fact that it is named group A vs B reflects historical artifact as opposed to scientific similarity.

[0042] FIG. 22 shows C. immunis maintains disease remission in mice with microbiotas different than MMb. The left panel demonstrates that RMb mice (gnotobiotic mice harboring a rat microbiota) are very susceptible to DSS colitis. In the right panel, treatment of RMb mice with C. immunis one-week prior to challenge with DSS leads to improved survival.

[0043] FIG. 23 shows that C. immunis can treat pre-existing inflammation, MMb mice were subjected to DSS colitis. Animals were treated with either C. innocuum (control) or C. immunis on day 5, when significant colonic inflammation already exists. C. immunis-treated mice have less weight loss and improved survival compared to the C. innocuum-treated control animals.

[0044] FIG. 24 shows exemplary 16rs sequence of a non-naturally occurring bacterium.

### DETAILED DESCRIPTION

### General

[0045] In certain aspects, provided herein are bacterium (e.g., a non-naturally occurring bacterium), methods and compositions related to the reduction of the amount, activity (e.g., IL-17 production) and/or proliferation of colonic group 3 innate lymphoid cells (ILC3s) in a subject and/or for the treatment and/or prevention of diseases associated with pathological immune responses (i.e., an immune disorder), such as inflammatory bowel diseases, through the administration of a bacteria disclosed herein or a composition comprising the bacteria (e.g., a naturally occurring and/or non-naturally occurring bacterium) of the family Lachnospiraceae. In certain aspects, provided herein are bacteria (e.g. non-naturally occurring bacterium), compositions comprising said bacteria, and methods of treating and or preventing a condition (e.g., a condition disclosed herein) by administering to the subject the bacteria or a composition comprising the bacteria.

### Definitions

[0046] For convenience, certain terms employed in the specification, examples, and appended claims are collected here.

[0047] The articles “a” and “an” are used herein to refer to one or to more than one (i.e., to at least one) of the grammatical object of the article.

[0048] As used herein, the term “administering” means providing an agent or composition to a subject, and includes, but is not limited to, administering by a medical professional and self-administering.

[0049] As used herein, an “effective amount” is an amount effective in treating or preventing a disease associated with a pathological immune response, including, for example, inflammatory bowel disease.

[0050] As used herein, the term “immune disorder” refers to any disease, disorder or disease symptom caused by an activity of the immune system, including autoimmune diseases, inflammatory diseases and allergies.

[0051] As used herein, the phrase “pharmaceutically-acceptable carrier” means a pharmaceutically-acceptable material, composition or vehicle, such as a liquid or solid filler, diluent, excipient, or solvent encapsulating material, involved in carrying or transporting an agent from one organ, or portion of the body, to another organ, or portion of the body. Each carrier must be “acceptable” in the sense of being compatible with the other ingredients of the formulation and not injurious to the patient. Some examples of materials which can serve as pharmaceutically-acceptable carriers include: (1) sugars, such as lactose, glucose and sucrose; (2) starches, such as corn starch and potato starch; (3) cellulose, and its derivatives, such as sodium carboxymethyl cellulose, ethyl cellulose and cellulose acetate; (4) powdered tragacanth; (5) malt; (6) gelatin; (7) talc; (8) excipients, such as cocoa butter and suppository waxes; (9) oils, such as peanut oil, cottonseed oil, safflower oil, sesame oil, olive oil, corn oil and soybean oil; (10) glycols, such as propylene glycol; (11) polyols, such as glycerin, sorbitol, mannitol and polyethylene glycol; (12) esters, such as ethyl oleate and ethyl laurate; (13) agar; (14) buffering agents, such as magnesium hydroxide and aluminum hydroxide; (15) alginic acid; (16) pyrogen-free water; (17) isotonic saline; (18) Ringer's solution; (19) ethyl alcohol; (20) pH buffered solutions; (21) polyesters, polycarbonates and/or polyanhydrides; and (22) other non-toxic compatible substances employed in pharmaceutical formulations.

[0052] As used herein, the term “subject” means a human or non-human animal selected for treatment or therapy. In certain embodiments, of the methods and compositions described herein the subject is a human subject.

[0053] The phrases “therapeutically-effective amount” and “effective amount” as used herein means the amount of an agent which is effective for producing the desired therapeutic effect in at least a sub-population of cells in a subject at a reasonable benefit/risk ratio applicable to any medical treatment.

[0054] “Treating” a disease in a subject or “treating” a subject having a disease refers to subjecting the subject to a pharmaceutical treatment, e.g., the administration of a drug, such that at least one symptom of the disease is decreased or prevented from worsening.

Bacteria that Reduce Production of ILC3s

[0055] In certain aspects, provided herein are compositions and methods related the use of bacteria that reduce the production of colonic group 3 innate lymphoid cells (ILC3s). In certain embodiments, the bacteria are of the family Lachnospiraceae. In some embodiments, the bacteria are of the genus Acetitomaculum, Anaerofilum, Anaerostipes, Blautia, Butyrivibrio, Catenibacterium, Catonella, Clostridium, Coprococcus, Dorea, Epulopiscium, Johnsonella, Lachnobacterium, Lachnospira, Oribacterium, Pseudobutyrivibrio, Roseburia, Ruminococcus, Shuttleworthia or Sporobacterium. In some embodiments, the bacteria are a non-naturally occurring bacteria. In some embodiments, the bacteria are the product of directed evolution.

[0056] In some embodiments, the bacteria comprise DNA having a sequence that is at least 10%, 15%, 20%, 25%, 30%, 35%, 40%, 45%, 50%, 55%, 60%, 65%, 70%, 75%, 80%, 85%, 90%, 95%, 96%, 97%, 98%, 99%, 99.1%, 99.2%, 99.3%, 99.4%, 99.5%, 99.6%, 99.7%, 99.8%, 99.9% or 100% identical to SEQ ID NO: 1. SEQ ID NO: 1 may be found in FIG. 24.

[0057] In some embodiments, the bacteria comprise a genome having a sequence that is at least 10%, 15%, 20%, 25%, 30%, 35%, 40%, 45%, 50%, 55%, 60%, 65%, 70%, 75%, 80%, 85%, 90%, 95%, 96%, 97%, 98%, 99%, 99.5%, 99.9% or 100% identical to SEQ ID NO: 2. SEQ ID NO: 2 may be found in ASCII format submitted herewith. SEQ NO: 2 is hereby incorporated by reference in its entirety.

[0058] In some embodiments, the compositions described herein (e.g., compositions comprising a bacterium comprising nucleotide sequences that are at least partially identical to SEQ ID NO:1 and/or SEQ ID NO:2) further comprise additional bacteria. The additional bacteria may be of the family Lachnospiraceae. In some embodiments, the additional bacteria of the family Lachnospiraceae are of the genus Acetitomaculum, Anaerofilum, Anaerostipes, Blautia, Butyrivibrio, Catenibacterium, Catonella, Clostridium, Coprococcus, Dorea, Epulopiscium, Johnsonella, Lachnobacterium, Lachnospira, Oribacterium, Pseudobutyrivibrio, Roseburia, Ruminococcus, Shuttleworthia or Sporobacterium.

[0059] In some embodiments, the bacteria in the methods and compositions provided herein are isolated. As used herein, term “isolated” encompasses a population of bacteria (e.g., a family, species and/or strain of bacteria) that has been (1) separated from at least some of the components with which it was associated when initially produced (whether in nature or in an experimental setting), and/or (2) produced, prepared, purified, and/or manufactured by the hand of man Isolated bacteria may be separated from at least about 10%, about 20%, about 30%, about 40%, about 50%, about 60%, about 70%, about 80%, about 90%, or more of the other components with which they were initially associated. In some embodiments, isolated bacteria are more than about 80%, about 85%, about 90%, about 91%, about 92%, about 93%, about 94%, about 95%, about 96%, about 97%, about 98%, about 99%, or more than about 99% pure. As used herein, a substance is “pure” if it is substantially free of other components. The terms “purify,” “purifying” and “purified” refer to a population of bacteria that has been separated from at least some of the components with which it was associated either when initially produced or generated (e.g., whether in nature or in an experimental setting), or during any time after its initial production. A bacterial population may be considered purified if it is isolated at or after production, such as from a material or environment containing the bacterial population, and a purified bacterial population may contain other materials up to about 10%, about 20%, about 30%, about 40%, about 50%, about 60%, about 70%, about 80%, about 90%, or above about 90% and still be considered “isolated.” In some embodiments, purified bacterial populations are more than about 80%, about 85%, about 90%, about 91%, about 92%, about 93%, about 94%, about 95%, about 96%, about 97%, about 98%, about 99%, or more than about 99% pure.

[0060] In some embodiments, the bacteria that reduce the production of ILC3s do not express a heterologous gene (i.e., are not recombinant). In some embodiments, the bacteria that reduce the production of ILC3s are recombinant. In some embodiments, the bacteria that reduce the production of ILC3s are attenuated. In some embodiments, combinations of species or strains of reduce the production of ILC3s are used in the methods and/or compositions provided herein. In certain embodiments, a combination of at least 2, 3, 4, 5, 6, 7, 8, 9, 10, 11, 12, 13, 14, 15, 16, 17, 18 or 19 of populations of bacteria that reduce the production of ILC3s are used in the methods and/or compositions described herein. In certain embodiments, provided herein is a composition (e.g., a pharmaceutical composition, a dietary supplement or a food product) containing bacteria or combinations of bacteria reduce the production of ILC3s. In some embodiments, the composition further comprises a pharmaceutically acceptable carrier.

[0061] In some embodiments, at least 10%, 15%, 20%, 25%, 30%, 35%, 40%, 45%, 50%, 55%, 60%, 65%, 70%, 75%, 80%, 85%, 90%, 95%, 96%, 97%, 98% or 99% of the bacteria in the composition are selected from among the bacterial populations described herein. 10%, 15%, 20%, 25%, 30%, 35%, 40%, 45%, 50%, 55%, 60%, 65%, 70%, 75%, 80%, 85%, 90%, 95%, 96%, 97%, 98% or 99% of the bacteria in the composition are selected from among the bacterial populations described herein.

[0062] In some embodiments, the compositions described herein may include only one population of bacteria described herein or may include two or more populations of the bacteria described herein. For example, 1, 2, 3, 4, 5, 6, 7, 8, 9, 10, 11, 12, 13, 14, 15, 16, 17, 18, 19 or 20 of the populations described herein, in any combination, can be included in the compositions provided herein. In some embodiments, the composition described herein may be a pharmaceutical composition, a dietary supplement, or a food product (e.g., a food or beverage). In some embodiments, the food product is an animal feed.

[0063] As described in detail below, the pharmaceutical compositions disclosed herein may be specially formulated for administration in solid or liquid form, including those adapted for oral or rectal administration.

[0064] In certain embodiments, the pharmaceutical composition for oral administration described herein comprises an additional component that enables efficient delivery of the bacteria to the colon, in order to more efficiently reduce the number, activity and/or proliferation of colonic ILC3s. In some embodiments, pharmaceutical preparation that enables the delivery of the bacteria to the colon can be used. Examples of such formulations include pH sensitive compositions, such as buffered sachet formulations or enteric polymers that release their contents when the pH becomes alkaline after the enteric polymers pass through the stomach. When a pH sensitive composition is used for formulating the pharmaceutical preparation, the pH sensitive composition can be a polymer whose pH threshold of the decomposition of the composition is between about 6.8 and about 7.5.

[0065] Another embodiment of a pharmaceutical composition useful for delivery of the bacteria to the colon is one that ensures the delivery to the colon by delaying the release of the bacteria by approximately 3 to 5 hours, which corresponds to the small intestinal transit time. In some embodiments, the pharmaceutical composition for delayed release includes a hydrogel shell. The hydrogel is hydrated and swells upon contact with gastrointestinal fluid, with the result that the contents are effectively released (released predominantly in the colon). Delayed release dosage units include bacteria-containing compositions having a material which coats or selectively coats the bacteria. Examples of such a selective coating material include in vivo degradable polymers, gradually hydrolyzable polymers, gradually water-soluble polymers, and/or enzyme degradable polymers. A wide variety of coating materials for efficiently delaying the release is available and includes, for example, cellulose-based polymers such as hydroxypropyl cellulose, acrylic acid polymers and copolymers such as methacrylic acid polymers and copolymers, and vinyl polymers and copolymers such as polyvinylpyrrolidone.

[0066] Examples of composition enabling the delivery to the colon further include bioadhesive compositions which specifically adhere to the colonic mucosal membrane (for example, a polymer described in the specification of U.S. Pat. No. 6,368,586, hereby incorporated by reference) and compositions into which a protease inhibitor is incorporated for protecting particularly a biopharmaceutical preparation in the gastrointestinal tracts from decomposition due to an activity of a protease.

[0067] An example of a system enabling the delivery to the colon is a system of delivering a composition to the colon by pressure change in such a way that the contents are released by utilizing pressure change caused by generation of gas in bacterial fermentation at a distal portion of the stomach. Such a system is not particularly limited, and a more specific example thereof is a capsule which has contents dispersed in a suppository base and which is coated with a hydrophobic polymer (for example, ethyl cellulose).

[0068] Another example of the system enabling the delivery to the colon is a system of delivering a composition to the colon, the system being specifically decomposed by an enzyme (for example, a carbohydrate hydrolase or a carbohydrate reductase) present in the colon. Such a system is not particularly limited, and more specific examples thereof include systems which use food components such as non-starch polysaccharides, amylose, xanthan gum, and azopolymers.

[0069] In some embodiments, the compositions described herein further comprise an immunosuppressive agent. Examples of immunosuppressive agents include, but are not limited to, corticosteroids, mesalazine, mesalamine, sulfasalazine, sulfasalazine derivatives, immunosuppressive drugs, cyclosporin A, mercaptopurine, azathiopurine, prednisone, methotrexate, antihistamines, glucocorticoids, epinephrine, theophylline, cromolyn sodium, anti-leukotrienes, anti-cholinergic drugs for rhinitis, anti-cholinergic decongestants, mast-cell stabilizers, monoclonal anti-IgE antibodies, vaccines (e.g., vaccines used for vaccination where the amount of an allergen is gradually increased), cytokine inhibitors, such as anti-IL-6 antibodies, TNF inhibitors such as infliximab, adalimumab, certolizumab pegol, golimumab, or etanercept, and combinations thereof.

[0070] In some embodiments, the composition is a food product (e.g., a food or beverage) such as a health food or beverage, a food or beverage for infants, a food or beverage for pregnant women, athletes, senior citizens or other specified group, a functional food, a beverage, a food or beverage for specified health use, a dietary supplement, a food or beverage for patients, or an animal feed. Specific examples of the foods and beverages include various beverages such as juices, refreshing beverages, tea beverages, drink preparations, jelly beverages, and functional beverages; alcoholic beverages such as beers; carbohydrate-containing foods such as rice food products, noodles, breads, and pastas; paste products such as fish hams, sausages, paste products of seafood; retort pouch products such as curries, food dressed with a thick starchy sauces, and Chinese soups; soups; dairy products such as milk, dairy beverages, ice creams, cheeses, and yogurts; fermented products such as fermented soybean pastes, yogurts, fermented beverages, and pickles; bean products; various confectionery products, including biscuits, cookies, and the like, candies, chewing gums, gummies, cold desserts including jellies, cream caramels, and frozen desserts; instant foods such as instant soups and instant soy-bean soups; microwavable foods; and the like. Further, the examples also include health foods and beverages prepared in the forms of powders, granules, tablets, capsules, liquids, pastes, and jellies.

[0071] In some embodiments the composition is a food product for animals, including humans. The animals, other than humans, are not particularly limited, and the composition can be used for various livestock, poultry, pets, experimental animals, and the like. Specific examples of the animals include pigs, cattle, horses, sheep, goats, chickens, wild ducks, ostriches, domestic ducks, dogs, cats, rabbits, hamsters, mice, rats, monkeys, and the like, but the animals are not limited thereto.

### Therapeutic Methods

[0072] In certain aspects, provided herein are methods for reduce the amount, activity (e.g., IL-17 production) and/or proliferation of colonic group 3 innate lymphoid cells (ILC3s and/or for treating or preventing a disease or disorder associated a pathological immune response, such as an autoimmune disease, an allergic reaction and/or an inflammatory disease. In some embodiments, the disease or disorder is an inflammatory bowel disease (e.g., Crohn's disease or ulcerative colitis). In some embodiments, the methods comprise administering to the subject a bacterium or composition disclosed herein.

[0073] The methods described herein can be used to treat any subject in need thereof. As used herein, a “subject in need thereof” includes any subject that has a disease or disorder associated with a pathological immune response (e.g., an inflammatory bowel disease), as well as any subject with an increased likelihood of acquiring a such a disease or disorder.

[0074] The bacteria disclosed herein and/or the compositions described herein can be used, for example, as a pharmaceutical composition for preventing or treating (reducing, partially or completely, the adverse effects of) an autoimmune disease. such as chronic inflammatory bowel disease, systemic lupus erythematosus, rheumatoid arthritis, multiple sclerosis, or Hashimoto's disease; an allergic disease, such as a food allergy, pollenosis, or asthma; an infectious disease, such as an infection with Clostridium difficile; an inflammatory disease such as a TNF-mediated inflammatory disease (e.g., an inflammatory disease of the gastrointestinal tract, such as pouchitis, a cardiovascular inflammatory condition, such as atherosclerosis, or an inflammatory lung disease, such as chronic obstructive pulmonary disease); a pharmaceutical composition for suppressing rejection in organ transplantation or other situations in which tissue rejection might occur; a supplement, food, or beverage for improving immune functions; or a reagent for suppressing the proliferation or function of ILC3s.

[0075] In some embodiments, the bacteria, compositions and/or methods of the present invention may be used or administered to treat diseases or disorders related to a deleterious immune response, such as asthma, inflammatory disease, skin or organ transplantation, graft-versus-host disease (GVHD), or autoimmune diseases. Examples of autoimmune diseases include, for example, glomerular nephritis, arthritis, dilated cardiomyopathy-like disease, ulceous colitis, Sjogren syndrome, Crohn disease, systemic erythematodes, chronic rheumatoid arthritis, multiple sclerosis, psoriasis, allergic contact dermatitis, polymyosiis, pachyderma, periarteritis nodosa, rheumatic fever, vitiligo vulgaris, insulin dependent diabetes mellitus, Behcet disease, Hashimoto disease, Addison disease, dermatomyositis, myasthenia gravis, Reiter syndrome, Graves' disease, anaemia perniciosa, Goodpasture syndrome, sterility disease, chronic active hepatitis, pemphigus, autoimmune thrombopenic purpura, and autoimmune hemolytic anemia, active chronic hepatitis, Addison's disease, anti-phospholipid syndrome, atopic allergy, autoimmune atrophic gastritis, achlorhydra autoimmune, celiac disease, Cushing's syndrome, dermatomyositis, discoid lupus, erythematosis, Goodpasture's syndrome, Hashimoto's thyroiditis, idiopathic adrenal atrophy, idiopathic thrombocytopenia, insulin-dependent diabetes, Lambert-Eaton syndrome, lupoid hepatitis, some cases of lymphopenia, mixed connective tissue disease, pemphigoid, pemphigus vulgaris, pernicious anema, phacogenic uveitis, polyarteritis nodosa, polyglandular autosyndromes, primary biliary cirrhosis, primary sclerosing cholangitis, Raynaud's syndrome, relapsing polychondritis, Schmidt's syndrome, limited scleroderma (or crest syndrome), sympathetic ophthalmia, systemic lupus erythematosis, Takayasu's arteritis, temporal arteritis, thyrotoxicosis, type b insulin resistance, ulcerative colitis and Wegener's granulomatosis.

[0076] In some embodiments, provided herein are bacteria, compositions, and methods for treating an inflammatory bowel disease. Inflammatory bowel diseases include, for example, certain art-recognized forms of a group of related conditions. Several major forms of inflammatory bowel diseases are known, with Crohn's disease (regional bowel disease, e.g., inactive and active forms) and ulcerative colitis (e.g., inactive and active forms) the most common of these disorders. In addition, the inflammatory bowel disease encompasses irritable bowel syndrome, microscopic colitis, lymphocytic-plasmocytic enteritis, coeliac disease, collagenous colitis, lymphocytic colitis and eosinophilic enterocolitis. Other less common forms of IBD include indeterminate colitis, pseudomembranous colitis (necrotizing colitis), ischemic inflammatory bowel disease, Behcet's disease, sarcoidosis, scleroderma, IBD-associated dysplasia, dysplasia associated masses or lesions, and primary sclerosing cholangitis.

[0077] In some embodiments, administration is in combination with administration of at least one pre-biotic substance (e.g., a prebiotic substance that favors the growth of the bacterial species in the composition over the growth of other human commensal bacterial species). In some embodiments, the prebiotic substance is a nondigestible oligosaccharide. In some embodiments, the prebiotic substance is almond skin, inulin, oligofructose, raffinose, lactulose, pectin, hemicellulose, amylopectin, acetyl-Co A, biotin, beet molasses, yeast extracts, and resistant starch.

[0078] In some embodiments, the subject is administered an antibiotic before the composition is administered to the subject (e.g., at least 1, 2, 3, 4, 5, 6, 7, 8, 9, 10, 11, 12, 13, 14, 15, 16, 17, 18, 19, 20, 21, 22, 23 or 24 hours before or at least 1, 2, 3, 4, 5, 6, 7, 8, 9, 10, 11, 12, 13, 14, 15, 16, 17, 18, 19, 20, 21, 22, 23, 24, 25, 26, 27, 28, 29 or 30 days before). Antibiotics include, but are not limited to aminoglycosides, ansamycins, carbacephems, carbapenems, cephalosporins, glycopeptides, lincosamides, lipopeptides, macrolides, monobactams, nitrofurans, oxazolidonones, penicillins, polypeptide antibiotics, quinolones, fluoroquinolone, sulfonamides, tetracyclines, and anti-mycobacterial compounds, and combinations thereof.

[0079] In some embodiments, the compositions described herein are administered in combination with an immunosuppressive agent. Examples of immunosuppressive agents include corticosteroids, mesalazine, mesalamine, sulfasalazine, sulfasalazine derivatives, immunosuppressive drugs, cyclosporin A, mercaptopurine, azathiopurine, prednisone, methotrexate, antihistamines, glucocorticoids, epinephrine, theophylline, cromolyn sodium, anti-leukotrienes, anti-cholinergic drugs for rhinitis, anti-cholinergic decongestants, mast-cell stabilizers, monoclonal anti-IgE antibodies, vaccines, anti-TNF inhibitors such as infliximab, adalimumab, certolizumab pegol, golimumab, or etanercept, and combinations thereof. Also described herein is a composition that comprises the bacterial composition and at least one substance selected from the group consisting of corticosteroids, mesalazine, mesalamine, sulfasalazine, sulfasalazine derivatives, immunosuppressive drugs, cyclosporin A, mercaptopurine, azathiopurine, prednisone, methotrexate, antihistamines, glucocorticoids, epinephrine, theophylline, cromolyn sodium, anti-leukotrienes, anti-cholinergic drugs for rhinitis, anti-cholinergic decongestants, mast-cell stabilizers, monoclonal anti-IgE antibodies, vaccines, anti-TNF inhibitors such as infliximab, adalimumab, certolizumab pegol, golimumab, or etanercept, and combinations thereof.

[0080] In some embodiments, the methods provided herein include the step of administering at least one antibiotic before or in combination with, the administration of a composition described herein.

[0081] In some embodiments, the methods provided herein include the step of determining the subject's microbiome prior to the administration of a composition described herein. In some embodiments, the selection of the bacteria or combination of bacteria administered to the subject is determined based upon the make-up of the subject's microbiome.

[0082] Actual dosage levels of the bacteria in the compositions described herein may be varied so as to obtain an amount of the bacteria which is effective to achieve the desired therapeutic response for a particular patient. A physician or veterinarian having ordinary skill in the art can readily determine and prescribe the effective amount of the composition required.

### Methods of Directed Evolution

[0083] In some embodiments, the methods disclosed herein relate to directed evolution and/or methods of identifying novel bacteria species. In some embodiments, the bacteria described herein is man-made or non-naturally occurring bacteria generated through directed evolution. An exemplary method of directed evolution may be found in Example 6. In some embodiments, directed evolution relates to examining gnotobiotic rodents harboring different microbial communities (e.g., a rodent comprising human microbiota). Co-housing of gnotobiotic rodents generates “progeny” that had hybrid microbiotas reflective of both “parents”. Using directed microbial culture techniques, novel species of bacteria may be recovered from hybrid microbiotas. In some embodiments, the bacteria disclosed herein are novel bacterial species, produced by methods of directed evolution disclosed herein. In some aspects, the methods provide herein are used to identify bacteria that correlate with protection or risk of disease by mapping microbe-phenotype relationships in subjects with parental strains and in subjects comprising microbiotas from other species. In some aspects, the methods of directed evolution disclosed herein relate to comparing the microbiomes of disease-resistant or disease-susceptible subjects. In some embodiments, the disease resistant and disease-susceptible subject are co-housed for a period of time, and the change in operation taxonomic units of bacteria in each microbiome are examined.

[0084] Provided herein are methods of identifying bacteria that convey disease resistance and/or disease susceptibility by determining a first microbiome profile for a disease-susceptible subject and/or a disease-resistant subject, co-housing the disease-susceptible subject with the disease-resistant subject for a period of time sufficient for the disease-susceptible subject to acquire disease resistance, and, after co-housing, determining a second microbiome profile for the disease-susceptible subject and/or a disease-resistant subject. In some embodiments, the method comprises comparing the first microbiome profile of the disease-susceptible subject with the second microbiome profile of the disease-susceptible subject to identify operational taxonomic units (OTUs) of bacteria that are more prevalent in the second microbiome profile of the disease-susceptible subject than the first microbiome profile of the disease-susceptible subject. Operational taxonomic units (OTUs) of bacteria that are more prevalent in the second microbiome profile of the disease-susceptible subject than the first microbiome profile may confer disease resistance. In some embodiments, the method comprises comparing the first microbiome profile of the disease-susceptible subject with the second microbiome profile to identify operational taxonomic units (OTUs) of bacteria that are less prevalent in the second microbiome profile of the disease-susceptible subject than the first microbiome profile of the disease-susceptible subject. Operational taxonomic units (OTUs) of bacteria that are less prevalent in the second microbiome profile of the disease-susceptible subject than the first microbiome of the disease-susceptible subject profile may confer disease susceptibility.

[0085] In some embodiments, the method comprises comparing the first microbiome profile of the disease-resistant subject with the second microbiome profile of the disease-resistant subject to identify operational taxonomic units (OTUs) of bacteria that are more prevalent in the second microbiome profile of the disease-resistant subject than the first microbiome profile of the disease resistant subject. Operational taxonomic units (OTUs) of bacteria that are more prevalent in the second microbiome profile of the disease-resistant subject than the first microbiome profile disease-resistant subject may confer disease susceptibility. In some embodiments, the method comprises comparing the first microbiome profile of the disease-resistant subject with the second microbiome profile of the disease-resistant subject to identify operational taxonomic units (OTUs) of bacteria that are less prevalent in the second microbiome profile of the disease resistant subject than the first microbiome profile of the disease resistant subject. Operational taxonomic units (OTUs) of bacteria that are less prevalent in the second microbiome profile of the disease-resistant subject than the first microbiome of the disease-resistant subject profile may confer disease resistance.

[0086] In some aspects, provided herein are methods of identifying bacteria that convey disease susceptibility and/or disease resistance by determining a first microbiome profile for a disease-resistant subject, co-housing the disease-resistant subject with a disease-susceptible subject for a period of time sufficient for the disease-resistant subject to acquire disease susceptibility, and, after co-housing, determining a second microbiome profile for the disease-resistant subject. In some embodiments, the method comprises comparing the first microbiome profile of the disease-resistant subject with the second microbiome profile of the disease-resistant subject to identify operational taxonomic units (OTUs) of bacteria that are more prevalent in the second microbiome profile of the disease-resistant subject than the first microbiome profile of the disease-resistant subject. Operational taxonomic units (OTUs) of bacteria that are more prevalent in the second microbiome profile of the disease-resistant subject than the first microbiome profile of the disease-resistant subject may confer disease susceptibility. In some embodiments, the method comprises comparing the first microbiome profile of the disease-resistant subject with the second microbiome profile of the disease-resistant subject to identify operational taxonomic units (OTUs) of bacteria that are less prevalent in the second microbiome profile of the disease-resistant subject than the first microbiome profile of the disease-resistant subject. Operational taxonomic units (OTUs) of bacteria that are less prevalent in the second microbiome profile of the disease-resistant subject than the first microbiome profile of the disease-resistant subject may confer disease resistance.

[0087] In some embodiments, the method comprises comparing the first microbiome profile of the disease-susceptible subject with the second microbiome profile of the disease-susceptible subject to identify operational taxonomic units (OTUs) of bacteria that are more prevalent in the second microbiome profile of the disease-susceptible subject than the first microbiome profile of the disease-susceptible subject. Operational taxonomic units (OTUs) of bacteria that are more prevalent in the second microbiome profile of the disease-susceptible subject than the first microbiome profile of the disease-susceptible subject may confer disease resistance. In some embodiments, the method comprises comparing the first microbiome profile of the disease-susceptible subject with the second microbiome profile of the disease-susceptible subject to identify operational taxonomic units (OTUs) of bacteria that are less prevalent in the second microbiome profile of the disease-susceptible subject than the first microbiome profile of the disease-susceptible subject. Operational taxonomic units (OTUs) of bacteria that are less prevalent in the second microbiome profile of the disease-susceptible subject than the first microbiome of the disease-susceptible subject profile may confer disease susceptibility.

[0088] In some embodiments, the disease is inflammatory bowel disease (e.g., Crohn's disease, ulcerative colitis, irritable bowel syndrome, microscopic colitis, lymphocytic-plasmocytic enteritis, coeliac disease, collagenous colitis, lymphocytic colitis and eosinophilic enterocolitis, indeterminate colitis, infectious colitis, pseudomembranous colitis, ischemic inflammatory bowel disease or Behcet's disease), psoriasis, or asthma.

[0089] The subject may be a human or a non-human animal, such as a rodent (e.g., mouse or rat). In some embodiments, at least a portion (e.g., at least 10%, at least 20%, at least 30%, at least 40%, at least 50%, at least 60%, at least 70%, at least 80%, at least 90%, or at least 99%) of the subject's microbiome is bacteria from another species. For example, the subject may be a mouse, and have a microbiome comprising bacteria naturally occurring in humans.

[0090] The period of time may be any time needed to exchange microbiome bacteria between subject. In some embodiments, the period of time is any time needed to confer disease resistance or disease susceptibility. For example, the time may be 12 hours, 24 hours, 36 hours, 48 hours, 3 days, 5 days, 1 week, 2 weeks, 3 weeks, 6 weeks, or 12 weeks.

### EXEMPLIFICATION

### Example 1

[0091] A chemically induced model of colitis was used to explore differences in the colonic immune response of these mice. It was found that, similar to germ-free (GF) mice, MMb mice were sensitive to chemically induced colitis with a 100% mortality rate. In contrast, HMb and SPF mice were resistant to chemically induced colitis (FIG. 1). Flow cytometric analysis of the colonic immune systems revealed that, unlike the small-intestinal immune system, there were no differences between MMb and HMb mice in the numbers of colonic B cells, T cells, or cells of the myeloid lineage (FIG. 2, Panels A and B). However, these mice differed in the number of colonic group 3 innate lymphoid cells (ILC3s), a rare cell type that has been construed as an “innate version” of a T-cell, with higher numbers of ILC3s correlating with more severe disease (FIG. 3). This analysis was done in healthy adult mice (˜8-10 weeks old).

### Example 2

[0092] Although an immunological correlate of disease was identified in Example 1, the microbiological cause for these differences was next examined. The general approach was to co-house MMb and HMb mice together (e.g., put the mice in the same cage), taking advantage of the fact that mice are copraphagic to allow for a horizontal transfer of microbes (FIG. 4). If a time period at which there is a difference in the immunological phenotypes can be identified, the microbiota of these co-housed mice can be examined to infer microbes that are associated with disease severity. A near-complete replacement of the HMb microbiota with that of the MMb mouse was observed when HMb mice were co-housed with MMb mice for 3-4 weeks. Accordingly, the next step was to identify the shortest duration of co-housing possible that still results in a difference in the immune phenotypes. Co-housing MMb and HMb mice for 1 day facilitated a bi-directional transmission of microbes that led to an intermediate disease phenotype in both groups (FIG. 5, Panels A and B).

### Example 3

[0093] The 16S rDNA from feces of the various mice was sequenced and their microbiotas were analyzed. The data is represented in FIG. 6 in a principal coordinates analysis, which is a graphical representation of differences in beta-diversity. The analysis demonstrates how similar or dissimilar the microbiota is to each other. The closer together 2 dots are in space the more similar is their microbiota.

[0094] FIG. 7 also includes the data generated from the HMb and MMb mice that were co-housed with each other for 1 day and then singly housed for another 13 days (hence the d14 nomenclature). As the data indicate, co-housing HMb and MMb mice for 1 day results in unique microbial communities.

### Example 4

[0095] To identify operational taxonomic units (OTUs; the bioinformatic equivalent of a bacterial species) that are differentially abundant between mouse strains, a free software program called LEfSe was used. 4 different pairwise comparisons were performed. FIG. 8 list the total number of different OTUs present in each pairwise comparison, and the number of differentially abundant taxa (identified by LEfSe) for each comparison. These taxa can be at any taxonomic level (i.e., phyla, order, class, family, genus, species). It was reasoned that if any of these taxa were biologically relevant, they should be shared in each of these comparisons in the same directionality with respect to disease severity. When these criteria were applied, the only taxa that remained was the bacterial family Lachnospiraceae (which contains a number of different genera and species, most of which are poorly characterized if at all).

[0096] In sum, bioinformatic analysis of the fecal microbiota of SPF, MMb, HMb, and co-housed mice identified the bacterial family Lachnospiraceae as a microbiological correlate for protection from disease.

### Example 5

[0097] Using the microbiota data for SPF, MMb, HMb, and co-housed mice, the abundance of Lachnospiraceae was next analyzed. It was found that the abundance roughly correlates with disease severity (FIG. 9).

[0098] To better define the role of Lachnospiraceae, a semi-selective media was used to culture feces from HMb mice on brain-heart infusion agar plates supplemented with antibiotics (colistin, aztreonam, and gentamicin). The 16S rDNA gene from the starting and final material was then sequenced. As shown in FIG. 10, semi-selective media allowed for a ˜5-fold enrichment of Lachnospiraceae.

[0099] To further define the role of Lachnospiraceae, a semi-selective media was used to culture a Lachnospiraceae-enriched pool of bacteria from HMb mice that—when orally administered to MMb mice—led to decreased numbers of colonic ILC3s. As a control, MMb mice were given bacteria cultured from MMb feces using the same media. MMb mice that received the cultured bacteria from HMb mice had a lower number of colonic group 3 ILCs (similar to HMb mice)(FIG. 11) and protection from colitis-associated mortality, confirming that these organisms are causally linked to ILC3 numbers and disease severity (FIG. 12, Panel A and 13). These group 3 ILCs are known to produce IL-22 and IL-17, two different cytokines relevant to epithelial barrier function and inflammation, respectively. It was found that there was a difference in the IL-17+ group 3 ILCs (FIG. 12, Panel B) with no change in the IL-22+ group 3 ILCs (FIG. 12, Panel A).

[0100] To demonstrate the link between administering Lachnospiraceae and survival from DSS colitis, MMb mice were administered bacteria cultured from HMb feces. These mice were protected from DSS colitis (FIG. 13). The abundance of Lachnospiraceae is increased in these mice, but the abundance of Erysipelotrichaceae (the other main family of bacteria present in the cultured material) was unchanged.

### Example 6

[0101] In the present study, it was found that MMb mice are exquisitely sensitive to dextran sodium sulfate (DSS)-induced colitis, exhibiting severe weight loss with a 100% mortality rate (FIGS. 1, Part A and B). In contrast, HMb and specific pathogen-free (SPF) mice lose significantly less weight, with mortality being rare (FIG. 1, Part A and B). This surprising dichotomy in survival between MMb mice and both HMb and SPF mice is not due to a lack of colonic inflammation in HMb or SPF mice: there is no difference in the degree of inflammation at day 5 of disease. However, MMb mice have slightly more severe inflammation than either SPF or HMb mice at day 10 (FIG. 1, Part C).

[0102] It was hypothesized that adapting a pedigree analysis to study the microbiome might illuminate a pathway for pinpointing microbes that are more likely to be causally related to disease. Mice were co-housed with different microbiotas to generate “progeny” that had hybrid microbiotas. Assuming that the microbial impact on disease is dominant, mapping of microbe-phenotype relationships in the “parental” strains and in mice with the hybrid microbiotas should enable triangulation of disease-modulating organisms. This idea is analogous to the use of family pedigrees—where the progeny have hybrid genomes reflective of both parents—to identify the genetic basis of disease.

[0103] To determine whether the effect of the microbiota is dominant in susceptibility to chemically induced colitis, HMb and MMb mice were co-housed for 3 weeks. Both HMb mice co-housed with MMb mice HMb^{MMb-3w}) and MMb mice co-housed with HMb mice (MMb′⁻³w) had intermediate phenotypes (FIG. 2, Part A), a finding that suggests a bi-directional transfer of microbes. To limit the degree of microbial change, the shortest period of co-housing that still resulted in a phenotypic difference was defined. HMb and MMb mice were co-housed for 1 or 3 days, after which the two groups were separated. On day 14, the mice were challenged with DSS; the rationale for this “rest period” was to allow time for physiological changes to occur. 1 day of co-housing was sufficient to induce significant differences in survival, and the duration of co-housing had a dose-dependent effect (FIG. 2, Part B and C).

[0104] In addition to differences in the severity of DSS-induced disease, it was found that the fecal microbiotas of mice co-housed for 1 day (HMb^{MMb-1d}, MMb^{HMb-1d}) the parental mouse strains (HMb, MMb), and SPF mice were each distinct from one another (FIG. 2, Part D). Bacteria that were differentially abundant in four pairwise comparisons were identified, including pairs where the mice were microbially “related” to one another and where the mice in each pair varied in disease severity. Each pairwise analysis represents a microbiome-wide association study, with each comparison resulting in ˜60-160 differentially abundant bacterial taxa (FIG. 2, Part E, and FIG. 17). If any of these taxa were truly relevant to disease pathogenesis, they would be present in all four of the comparisons. The only taxon that fit this additional criterion was Lachnospiraceae. This family of Gram-positive, anaerobic, non-spore-forming bacteria was associated with survival from DSS-induced colitis. Indeed, the abundance of this family was negligible in MMb mice, intermediate in SPF and co-housed mice, and high in HMb mice (FIG. 2, Part F). Interestingly, the family Lachnospiraceae has been identified in multiple human studies as similarly being inversely correlated with IBD, though the significance of this association remains to be clarified.

[0105] It was then investigated whether Lachnospiraceae is causally linked to improved survival. Feces from HMb mice (HMb cx) were cultured, obtaining a ˜5-fold enrichment on semi-selective medium; the cultured bacterial consortium consisted of ˜40% Lachnospiraceae (FIG. 3, Part A). As a control, feces from MMb mice (MMb cx) were cultured on the same semi-selective medium and found no enrichment of Lachnospiraceae—a finding consistent with the presence of insignificant amounts of this bacterial family in MMb mice (FIG. 18). These bacterial cultures were administered to colitis-prone MMb mice to determine whether Lachnospiraceae can protect against colitis-associated death. Although all MMb mice given MMb cx still succumbed to disease, MMb mice that received HMb cx were remarkably protected (FIG. 3, Part B). The microbiota of these two groups of mice were distinct from each other (FIG. 19); MMb mice that received bacteria cultured from HMb mice had more abundant Lachnospiraceae (FIG. 3, Part C). To ensure that the increased survival was specifically due to the administered bacteria rather than to an unrelated change in the pre-existing MMb microbiota, GF mice were colonized with the HMb cx bacterial mixture and found that these mice were similarly protected from colitis-associated death (FIG. 20).

[0106] In order to directly test whether Lachnospiraceae could protect mice against colitis, a single isolate was recovered from HMb feces that was in the family Lachnospiraceae and that accounted for ˜24% of the bacterial abundance in the HMb cx bacterial consortium. The 16S rDNA gene sequence of this isolate shared 98% identity with Clostridium symbiosum but its biochemical properties did not fit either species (see Methods for a more detailed description). Thus, the isolate represents a novel bacterial species, Clostridium immunis. Isolate was administered to MMb mice to determine whether it protected the animals against colitis; as a control, a Clostridium innocuum isolate that accounted for ˜9% of the bacterial abundance in the HMb cx consortium was used. Remarkably, only the MMb mice treated with C. immunis were protected from colitis-associated death (FIG. 3, Part D). Clearly, this isolate is causally related to protection from colitis. This outcome provides mechanistic insight into the clinical observations that the abundance of Lachnospiraceae is inversely correlated to risk of IBD. Moreover, these findings offer critical preclinical support for the use of C. immunis as a probiotic in patients with IBD who have lower abundances of Lachnospiraceae.

[0107] The results delineate a bioinformatically straightforward approach that can be used to triangulate specific members of the microbiota that are likely to influence disease pathogenesis. Combination of microbiota analyses from multiple “family pedigrees” allows the researcher to trade sensitivity for increased specificity. A single bacterial taxon was associated with the phenotype of interest, and this correlation was substantiated by directed microbial culture techniques and add-back experiments to fulfill Koch's postulates. Although Koch's postulates and modern revisions of them formally apply only to the identification of pathogens, these findings with a disease-protective commensal organism conform to all of their major tenets. As the field of microbiome research further matures, an increasing number of microbes will most likely be causally linked to protection from disease. Koch's postulates may be expanded to apply to the identification of beneficial organisms, thus ensuring that the burgeoning field of probiotics is subject to the same degree of scientific rigor that has been required in research on microbial pathogenesis.

[0108] This “microbial pedigree” analysis may be more generally applicable to human microbiome studies as well. Like the identification of family pedigrees that are informative for genetic analyses, thoughtful selection of study participants and controls may obviate the current trend toward increasingly large, ever more complicated study designs while allowing meaningful comparative analyses. Furthermore, the results from other “-omics” datasets (e.g., transcriptomics, metagenomics, metabolomics) can be analyzed by means of microbial pedigree analysis in order to refine lists of results and determine which are causally related to the phenotype.

### Materials and Methods

### Mice

[0109] GF Swiss-Webster (SW) mice were bred and maintained in vinyl isolators in the animal facility at Harvard University. MMb and HMb mice have been bred and maintained at this facility in separate vinyl isolators since their initial characterization. Experimental manipulation of gnotobiotic mice was performed in sterile cages (Innovive; San Diego, Calif.) in which animals received autoclaved food and water. SPF SW mice obtained from Taconic Biosciences were fed an autoclaved diet similar to that given to gnotobiotic mice for 1 week before the start of the study and for the duration of all experiments. Mice used in experiments were age-matched (typically 5-10 weeks old) and drawn randomly from the same litter, where feasible. All procedures were approved by the Harvard Medical Area Standing Committee on Animals and were conducted in accordance with NIH guidelines.

### DSS Colitis

[0110] DSS experiments were performed as previously described. In brief, mice were given 4% DSS (molecular weight, 36,000-50,000 Da; MP Biomedicals) ad libitum in their drinking water for 7 days, with the DSS solution changed every 2-3 days. From day 7 until the end of the experiment, the mice were given autoclaved water with no DSS. Animals were weighed every 1-2 days, and any mouse that appeared moribund was sacrificed. A pathologist blinded to treatment groups conducted a histologic assessment of colons. The histologic score represented the combined scores for inflammation and ulceration; both elements were scored 0-4, with 0 being normal.

### Co-Housing Experiments

[0111] For co-housing of MMb and HMb mice prior to DSS experiments, two mice per group were placed together in a cage (total, 4 mice) for the indicated period. For a co-housing period of 1 or 3 days, the MMb and HMb mice were separated at the relevant time point, placed into a new sterile cage until day 14 (to allow physiological changes to occur), and then challenged with DSS. For co-housing of MMb and HMb mice for the purpose of fecal microbiota analysis, one mouse per group was placed in a cage (total, 2 mice) for 1 day, after which the mice were separated and individually housed until day 14. Fecal pellets were collected on days 0 and 14 and were frozen at −80° C. until further processed.

16S rDNA Sequencing and Analysis

[0112] Fecal samples were added to a tube containing 400 μl of zirconia/silica beads (0.1 mm in diameter; Biospec), 250 μl of 20% sodium dodecyl sulfate, 500 μl of buffer PBI (Qiagen), and 550 μl of phenol-chloroform-isoamyl alcohol (25:24:1; pH 7.9; Ambion) and then homogenized by bead beating for 2.5 min. After centrifugation (10,000×g for 5 min), the DNA in the aqueous phase was purified with a QIAquick PCR purification kit (Qiagen) according to the manufacturer's instructions except that the PE wash step was performed twice. DNA was eluted with 50 μl of EB buffer (Qiagen).

[0113] Detailed protocols used for 16S rDNA amplification and sequencing have been described. In brief, the V4 region of the 16S rDNA gene was PCR-amplified (35 cycles, primers 515F and 806R) in triplicate; 1 μl of purified DNA and 5′ Hot Master Mix (Five Prime) were used Amplicons were quantified by Quant-It (Invitrogen), pooled in equimolar concentration, and size-selected (375-425 bp) on the Pippen Prep (Sage Sciences; Beverly, Mass.) to reduce nonspecific amplification products. Sequencing was performed on a MiSeq sequencer (Illumina; 2×250 bp paired-end reads using V2 chemistry).

[0114] Microbial diversity was analyzed with Quantitative Insights into Microbial Ecology (QIIME versions 1.8 and 1.9). The closed-reference operational taxonomic unit (OTU) workflow in QIIME and the Greengenes reference database (May 2013) were used to cluster reads into OTUs with 97% identity and to assign taxonomy to representative OTUs. OTU tables were rarified to a depth of 40,000 and 13,000 sequences per sample for experiments described in FIGS. 2 and 3, respectively. Principal-coordinates beta-diversity visualizations were created with Emperor as packaged in QIIME. The Linear Discriminant Analysis Effect Size (LEfSe) Galaxy module (http://huttenhower.sph.harvard.edu/galaxy/) was used for additional statistical analyses.

### Bacterial Culture

[0115] Serial dilutions of feces from MMb and HMb mice were spread on brain—heart infusion (BHI) agar supplemented with colistin (10 μg/ml), gentamicin (6 μg/ml), and aztreonam (5 μg/ml), and cultures were incubated for 7 days in an anaerobic chamber (Coy Industries; Grass Lake, Mich.). MMb cx and HMb cx samples were harvested from plates that contained ˜500-1000 colonies, resuspended in pre-reduced BHI agar, and frozen at −80° C. until needed. To recover specific isolates, HMb feces were cultured on the medium described above for 5-14 days and picked ˜60 individual colonies. These colonies were inoculated into pre-reduced chopped meat medium with glucose (Anaerobe Systems; Morgan Hill, Calif.), and genomic DNA was isolated with the DNeasy Blood and Tissue Kit (Qiagen). We compared the 16S rDNA gene sequence from each of these isolates to Genbank and the Greengenes reference database to identify bacterial taxonomy.

### Probiotic Administration to Mice

[0116] MMb and GF mice received orally administered MMb cx, HMb cx, Clostridium innocuum, or Clostridium immunis (100 μl; ˜10⁸-10⁹ colony-forming units). Seven days later, the mice were challenged with DSS. In some experiments, fecal samples were collected before and 7 days after probiotic administration for microbiota analysis.

Characterization of C. immunis

[0117] The Lachnospiraceae isolate disclosed herein stains gram-negative, is resistant to colistin differential disks (Anaerobe Systems), and is sensitive to vancomycin and kanamycin differential disks (Anaerobe Systems). Taken together, these findings are consistent with the isolate's being a gram-positive organism. The closest match for the 16S rDNA gene sequence of this isolate is Clostridium symbiosum, with which it shares 98% identity; MALDI-TOF analysis by VITEK MS (BioMerieux; Durham, N.C.) revealed that the closest match for this isolate is Clostridium clostridioforme; and MALDI-TOF analysis with the MALDI Biotyper (Bruker; Billerica, Mass.) was unable to provide a species- or genus-level identification. Biochemical testing demonstrated that the isolate—unlike C. symbiosum—is resistant to 20% bile and does not produce acid from mannose. Moreover, the isolate—unlike C. clostridioforme—produces abundant amounts of butyrate from peptone-yeast extract-Fildes solution-glucose broth. Given these genetic, proteomic, and biochemical differences from its closest relatives, this isolate represents the type strain of Clostridium immunis, a novel species within the family Lachnospiraceae. Below is a preliminary annotation of the Clostridium immunis genome and a summary of biochemical properties of Clostridium immunis.

TABLE 1
Annotation of Clostridium immunis genome.

| Genome Feature | C. immunis |
|---|---|
| Size | 5.44 Mb |
| % GC | 47.7 |
| N50 | 3,429,461 |
| Number of contigs | 7 |
| Number of coding sequences | 5905 |
| Number of RNAs | 75 |
| Virulence genes | None detected; predicted |
| | to be avirulent |
| Antimicrobial Resistance | tetracycline |
| Genes | |

TABLE 2
Biochemical Properties of C. immunis vs
Representative Bacterial Stain

| | C. | C. | C. |
|---|---|---|---|
| | immunis | symbiosum | clostridioforme |
| SCFA production | Acetate, | Acetate, | acetate |
| from PYG-F | butyrate | butyrate, | |
| | (lactate | lactate | |
| | not tested) | | |
| Ferments | No | add | Weak acid |
| mannose | | | |
| Growth in 20% | Yes | no | Yes |
| bile | | | |
| Esculin hydrolysis | No | No | Yes |

### Statistics

[0118] Sample size estimates for each experiment were based on prior lab experience. Prism 6 (GraphPad Software; La Jolla, Calif.) was used for all statistical analyses. All p values were calculated by unpaired, two-tailed Student's t or Mann-Whitney test, as appropriate. For survival curves, p values were calculated by the Mantel-Cox test.

### INCORPORATION BY REFERENCE

[0119] All publications, patents, and patent applications mentioned herein are hereby incorporated by reference in their entirety as if each individual publication, patent or patent application was specifically and individually indicated to be incorporated by reference. In case of conflict, the present application, including any definitions herein, will control.

### EQUIVALENTS

[0120] Those skilled in the art will recognize, or be able to ascertain using no more than routine experimentation, many equivalents to the specific embodiments of the invention described herein. Such equivalents are intended to be encompassed by the following claims.

1. A method of reducing the amount, activity and/or proliferation of colonic group 3 innate lymphoid cells (ILC3s) in a subject comprising administering to the subject a composition comprising a bacteria of the family Lachnospiraceae.

2. The method of claim 1, wherein the bacteria of the family Lachnospiraceae are of the genus Acetitomaculum, Anaerofilum, Anaerostipes, Blautia, Butyrivibrio, Catenibacterium, Catonella, Clostridium, Coprococcus, Dorea, Epulopiscium, Johnsonella, Lachnobacterium, Lachnospira, Oribacterium, Pseudobutyrivibrio, Roseburia, Ruminococcus, Shuttleworthia or Sporobacterium.

3. The method of claim 1, wherein the subject suffers from or is predisposed to an inflammatory bowel disease, psoriasis, or asthma.

4. The method of claim 1, wherein the inflammatory bowel disease is Crohn's disease, ulcerative colitis, irritable bowel syndrome, microscopic colitis, lymphocytic-plasmocytic enteritis, coeliac disease, collagenous colitis, lymphocytic colitis and eosinophilic enterocolitis, indeterminate colitis, infectious colitis, pseudomembranous colitis, ischemic inflammatory bowel disease or Behcet's disease.

5. (canceled)

6. The method of claim 1, wherein at least 10% at least 25%, at least 50%, at least 75%, at least 90%, or at least 99% of the bacteria in the composition are of the family Lachnospiraceae.

7-12. (canceled)

13. The method of claim 1, wherein the composition is a food product supplemented with the bacteria.

14. The method of claim 1, wherein the composition is administered orally.

15. The method of claim 1, wherein the composition is administered rectally.

16. The method of claim 1, wherein the bacteria are live, replication competent bacteria.

17. The method of claim 1, wherein the administration of the composition reduces the number of IL-17 expressing colonic ILC3s in the subject.

18. The method of claim 1, further comprising administering a pre-biotic to the subject.

19. The method of claim 1, further comprising administering an antibiotic to the subject prior to the administration of the composition.

20. A pharmaceutical composition comprising a bacteria of the family Lachnospiraceae and a pharmaceutically acceptable carrier.

21. The composition of claim 20, wherein the bacteria of the family Lachnospiraceae are of the genus Acetitomaculum, Anaerofilum, Anaerostipes, Blautia, Butyrivibrio, Catenibacterium, Catonella, Clostridium, Coprococcus, Dorea, Epulopiscium, Johnsonella, Lachnobacterium, Lachnospira, Oribacterium, Pseudobutyrivibrio, Roseburia, Ruminococcus, Shuttleworthia or Sporobacterium.

22. The composition of claim 20, wherein at least 10%, at least 25%, at least 50%, at least 75%, at least 90%, or at least 99% of the bacteria in the composition are of the family Lachnospiraceae.

23-27. (canceled)

28. The composition of claim 20, wherein the composition is a food product supplemented with the bacteria.

29. The composition of claim 20, wherein the composition is formulated for oral administration.

30. The composition of claim 20, wherein the composition is formulated for rectal administration.

31. The composition of claim 20, wherein the bacteria are live, replication competent bacteria.

32. The composition of claim 20, further comprising a pre-biotic.

The application's sequence listing, which the Patent Office published only in electronic form, follows.

SEQUENCE LISTING (2 sequences)

SEQ ID NO: 1 - DNA, 1483 bp, Artificial Sequence
  source: /note="Description of Artificial Sequence: Synthetic polynucleotide"
  modified_base (1427)..(1427): a, c, t, g, unknown or other
  modified_base (1465)..(1465): a, c, t, g, unknown or other
  modified_base (1477)..(1477): a, c, t, g, unknown or other
gctcaggatgaacgctggcggcgtgcctaacacatgcaagtcgaacgaagcgatttaacggaagttttcggatggaagttgaattgactgagtggcggacgggtgagtaacgcgtgggtaacctgccttgtactgggggacaacagttagaaatgactgctaataccgcataagcgcacagtatcgcatgatacagtgtgaaaaactccggtggtacaagatggacccgcgtctgattagctagttggtaaggtaacggcttaccaaggcgacgatcagtagccgacctgagagggtgaccggccacattgggactgagacacggcccaaactcctacgggaggcagcagtggggaatattgcacaatgggcgaaagcctgatgcagcgacgccgcgtgagtgaagaagtatttcggtatgtaaagctctatcagcagggaagaaaatgacggtacctgactaagaagccccggctaactacgtgccagcagccgcggtaatacgtagggggcaagcgttatccggatttactgggtgtaaagggagcgtagacggtaaagcaagtctgaagtgaaagcccgcggctcaactgcgggactgctttggaaactgtttaactggagtgtcggagaggtaagtggaattcctagtgtagcggtgaaatgcgtagatattaggaggaacaccagtggcgaaggcgacttactggacgataactgacgttgaggctcgaaagcgtggggagcaaacaggattagataccctggtagtccacgccgtaaacgatgaatactaggtgttggggagcaaagctcttcggtgccgtcgcaaacgcagtaagtattccacctggggagtacgttcgcaagaatgaaactcaaaggaattgacggggacccgcacaagcggtggagcatgtggtttaattcgaagcaacgcgaagaaccttaccaggtcttgacatcgatccgacgggggagtaacgtccccttcccttcggggcggagaagacaggtggtgcatggttgtcgtcagctcgtgtcgtgagatgttgggttaagtcccgcaacgagcgcaacccttattctaagtagccagcggttcggccgggaactcttgggagactgccagggataacctggaggaaggtggggatgacgtcaaatcatcatgccccttatgatctgggctacacacgtgctacaatggcgtaaacaaagagaagcaagaccgcgaggtggagcaaatctcaaaaataacgtctcagttcggactgcaggctgcaactcgcctgcacgaagctggaatcgctagtaatcgcgaatcagaatgtcgcggtgaatacgttcccgggtcttgtacacaccgcccgtcacaccatgggagtcagtaacgcccgaagtcagtgacccaaccgcaaggaggnagctgccgaaggcgrsaccgataactggggtgaagtcntacaagggttanccgtaa

SEQ ID NO: 2 - DNA, 5444010 bp, Clostridium immunis (residues 1-1,814,670 of 5,444,010)
aaccacctcaatcggatgagccgtctccacttgataatcattcatcatcctgacagcttccagagcagaaataattcccagattcccgtcatagagtccgccttccgttaccgtatcaagatgggaacctgtcataatcgacaaagccccctcctgcttccctctctgcgtccgataatattgcccacccggtcttttgaaaccgtaagaccggcttccttcatcattgcgattaattctttagacgccatctcatattccctgctaaagcccggggggtgatccccccattctctgtttttccgatatccccgtccggtgaaggctttccatcagacgttccatattcacatctgtccgcatgtttctcctcctgttcctgcagcatctgcaaatttcttctccggctcctcttctattctgtccttttttccaaaaaattcatccactgtctctttgggcggcgcggagtcatcagacttactaatatattggctgccgtcgacgtgaaaatggccggaagaattggcatccatccaaatggctgtttcagtacataccatattactgccgtcaggataccggccagcataccggccatcccccctgggcgtttgaccgtttccaggtaaatccgataatgatcgtcatagcaagcatcgagccgagaacgcccaccatattggactgaatcatcagaacggtggaagaattaaacagtgacaatactatcgatattatccaaccgtcatgtcgttccttttgatatcgccagtacccgctccccctctgcattcggattgataaatttctgatagatatccctggttgccgtggttcccgcctgtaaaaggacggaggctgccgtggatatggcggcacccaggatggcggccagcacgattccccctatcagaggactcaccatttctaccattgcaattgaagccaccgtatctgtctgtacaatgccggccggaggattctcattcccaggccaattaccataagcggaagataaaaaagaacaaaaagtatgcccgaaattccctggctgtaacgcgccgttttttcgtctttacaggaattaaactttgtaataagctgcggcagcccgaaattaccaatcccccaggtcacacaccatgaaagcgccagtcctgcgccgatacttccgccggcaaaaggatcagaagcgccgggtcctccgtgtaagctaaccggtgcaattcccagaatccgcctgtcttacgagaatggcaatcatcagcgcatatgctccaaaaagaatcaaaacggatgtcaaaacactggtccatgcaactgatttcatcccgcccgtcaccgtaaaggccagaaacacgatcccacaattatcacggacagatactccggaatccctgtgatcaccttaataatggaggccgatgcaaccagctgggccatggtaaacagaacggttgaaaataaaattagaactgcggctatcgccccatgggcctttccaaaccgtctgtccaggaaatcggaaattgtgacaccgccaaaccgcctgagacgggctgcaaaaaatccggcaaacagtatcgtacagattaaggttcctgcccagttccaccagcctccccatccgaactgatagtaataccccatatacccgataaaagataccgcactcaataccgtcgtaaaatatgaagccgcgctggaccagactccaaggctcctccccgccactgcccagtcatcgctgcttgatactccgcgtgacgcaagcttcccaacaaaaatcagtgccgccagataaagcagcagaattatcacataaaccataaatacctcctccaataactcctccgaatatcactctacttgttccgtctgtcatcccgtttctgcgtaatataagccaaaatcattggaagcaggctgagaaatccaaaaaagagccaaaaaatcttcaaatctgccggtataaaatctggaatcatcccttttcctcctcatttttttctatatatgtttcgagcaggtgtccccagcccttgctctcctcatccacaatcccgttttccataaccacgcgccctctgacaacggtcatcaccggctttcccttcagtctccagccgtcatacactttggcaatttccctggactgtgagtaattttgattcttatttaccgtaaatacctcatccatgtccaccattacaaagtcggcatccgcgccggcgcttatcacaccctttttcggatacaggccaaatgattttgccacattcgtactcatgagatcaactgcgcgttccatcgataacctcttttcattgactgcgttgagcatcaggggaagacggagatccacgccgaggaaaccggatggagccacaaatatatcatcttttccgctttctttttccgcaaccgtataagtcgcatgatcacttcctataaaatcaacggaaccgtctcttacataatcccataatgcatccacgtcttctttttttctaagaggcggattgcatttcgcataggcgccatgctttaccacatcttcctcggtcaggaacagatactggggacatgtttccatataaacctccagcccctcctgtttggccgatttgataagctccatggattcaggagtcgacatgtggcagaatatcagcttcacaccgcagtcctttgcaatcatcagcagctttccgactgtctcatattccgcaaatttggggcgggacaggcaatggtaaatcggggacacttttccctcttttctgaattcctttatcattttcgaaataatatcattgttttccgcatggaccgcacacagcttacccgtcttggccacttcgcggaagccaaaatacatctccccgtcatttgccatcgtaagccccatgaattcctcgtccttccctccggcgcatcatggaggaaggttttgaaagcgacaattcccgtctcccccatttctctgattttatcgggatactttgaacctgccgcaccaaagaaagcaaaatccacgacacatttgtccgaggcatcacgaattcttctctccaggatctccttggaatactgcggcggttttgcaatcggatgttccaggatcgtcgtaacacctccggcggcagccgccttcgtctccgtaaagaaggttcctctgtccggtctgcccggttctctaacatgcatatgggactctatcatcccaggaagcaggtactttccctctgcgtctatcactttctccgcctcaggtatttcactgtccgtgctaacgctggcaatcattccgtccctgactgccacagcgccttgaaaaaaagtcccgtttgtataaatctttgcatttttgattactaaatccgcctgtttcattttcttcctcctaaattacatctgaatcgttcttttctgtcaccacattctttgattctttttttcatatgctccggccgaagcaaatgttgaatttttccttgcaaggaggttttttttctgataatatttaataaaatttataacttgtataagaattataacatcggctttttctgatgtaaaatattaaaacctgttcataatcatcggctttttcgatatttaaagaaaggaagtgctgtatgaacccccttgaaattgaggcttttctggctatcaccgagaccaggaacctgtctaaagctgccgataaactgtttgtatcccaatctacaatcagcagccgcctgaccaatctggagtcagaaatcggaagtcctctcgtgaaccggcgccccggaatcaaaggagtgaccctgactccgaaaggcaacgaattccttaccctggccagccgttatctggaggtggaaaaagatattaaaacctggaaggagaacttgtcctgctatgaactgaaggtttcagcgccgcacagcatcaattcttttttatttaccggcctttacagccgtttctccggcagcagccagctgagacttacaatcagcacccactggaacaataccatttataatcttatggacaattacctcctggatatcggctttgtatcccggccgtttccatccaggaatcttgtcacttcgcctattttctgtgagccgatggttctggtcagtgaccggcgctactcctcctatccggatattataaaagtggagtcgctgtccgtggaggacgagacttatattgacctgggcgtggaatttgaaatctggcataaccgaaactggagtcctatcacaaaaccaaaggtcactgtcgacactccgcccctgattgagttttttctccagtcagaacgtgcatgggctgctgtcccgctctgtgtggcggagatgattaaccgcgacagaaatattgtcatctcatcacccgaaccggagctgcccgcccggacaatctatctcgtgacccagagagaagccaatccctccggtgcaaaggccgtccgcatgtttatcgaggaaacaaaaaaatttgtggcgtccatgcccagcgtgattccaattgaaaagaacctgccgcaccagcggtaagctcctgccgccgcaggcattggctcacttagcgagtgtaacgagcttagtgaacaagccctctttagagttgcgatcctttgcggagcggttttaatttaacaggagaactttcctgttaaattaaataaacaatgccatattgcagtcaattaaaactgtaatatggcattgttttttattttataaaccctaactgttataacaccggaagatatccgagcagaagcccggctcccataaatattacaaatattccgatacaccatttgaaaatatagccctggtactcggccagcgaaatttctgtcagatccatcagcaggtaaataaacggcaccagcgggctgaggaaatggaaggcctgacccatcagggcagcaaaaccaatctggagatccgtaaagccataggcctgagccgtcgctgccagaggcggcagaacaccgtaatagaaggcgtcattattcagaaggtatgtaccgggcgcactgatcacggcaataatcactgcaaaataacgtcccagagattccggaattaccgatacaaggaactgtgcaatagcatttgacatgccggcatcttcaggtccgttcagaactcccatgagaactccggctcccagaaccatcatgacaacgctgatcatgtcgggtgcgagcgagctgattacctttctctgtgttttctgcaccgggtaattaaccaccagtgcgattgcggtacctacaccaaacagaatggcggaggatgccagacccataatcagggacgtgatgattgcaaccgtgagaagcaggttgaacagaatcatcttcggacgtttccactccctctcctcgtcagagagctccactgtgtttaccgagttgctgatatccataatcccgagccttttgcgctctttcagtcccagatagtaggaaactcctattacatagactgccgacagggccattcccggtacaagcggagccaggagctcaccggcgtccagattcataacggacataacacgggccgtcggacctccccaaggaatcaggttcataatacaattctgaagaataatcaggtttgcaagataaatctttttaattttcagcctgttgtaaatcggaatcatggccgtacagcagatcatgacggttgttgttccgtctccgtccagggaaacgaaagcggcaagaacagcggttcccaccagaaccttcagcggatcgcctttgcaccaggcaactactttgtcaaccatcggatcaaacataccggcggtgagcataaccccgaaatacaggattgcaaacgtcatcattgaaaatgtggatgctacacttttgattccgtccatggcgtacttaagcgtatcccatccataaccggccagcagtccgaaggcaatcggcaccagtatcaatgatgtgaacggacttaatttttttgccataatcagcgccataaacacaacgatcatggcaaaccccagaaaagctaaagacataacatactcctcctttttttatcgacttcttttgatttcttgcccattggctttcagtcataccccattttattctgctcttcttaatatctcatgaaaaagtcttaagaaacgttcacattttagtcaattttggcagtcttagcgggaaattaacggtatcttttcatgtttttttctataatgaagatacgcattgaaaaagaaaggtggattattatgtcagacggtactgttttgattgtagacgatgagcctgcgatacgcaagctgctgacacgggtggctgccagctgcggctatgagtctcttaccgcttccaacggacatgaggcaatcgtcatgagccgtgacagcaagattaatctgatcctgctggatattatgatgaatggaaatgatgaagggtttgaagtaatccgccgcctgagggcctccgggaatgagataccaatcatcgttctgagcggccgtacggaggatttcgataccttgtacggcctcgatatcggagccgacgattatataggaaagccctttaatccggtggtgctgggcgctaaaatgaaagcactcatccgcagggacatgaaagcttccaggccgctccctgattttatcacggccggcccgttttgctataacagtatgacaatggaactctttaaagataaccggccgattcctctctcatccagagagaatgttttaatgaagctgtttctgtgcaatgccggccgtgtcttcacaaaagaacagctctatgagcatgtctggaacggctccgtcgtggatgccaatacgattatggtttacataagtcatctcagaaacaagatagaagaagatcccaaaaacccccggtatctgaaaacagtctgggggctgggctacaaattttccgtaaaaatataagcttcggctgctgtcctgcaatttaaaggtacagcagccatttttttcttgcatcgcccacacttttaccatagaatagaaatatatatgtaaaatattcatgaatattccgccgcagcggacttaagctcctctcccggcggaagcatactattcttttttatagaaaggaatcgataaatgccggatcattttaaagatacgcagaaaatacaggaactcctccatgaagctcaaatggggctctgggttttagaacttaacgaaggaaaagagccgcggatgtatgcggatcatacaatgctggaactgctgggtttcagtacggaaccggctcccgaggagtgttaccgcgtctggtatgaccgtattgacgccgactattacgattttgtgcagtctgccgtggaacgaatcacttccgatggccgcgccgaggtacagtatacctggcaccatccaaaatggggagagatttttatacgctgtggcggtaaacgcgactttagctatactgagggcgtctgtctgaggggatatcatcagaatatcaccaatacctttatgctgaaaaaagaatatgatatcattatccagactctgggcgaaagttataccggaattttcctttgcaatctggatgaccagagctacaaggccataaaagtttcaggacgccttcaggagctctccctcaaatatacaaaatttggagactttttccgtgtctactctgccgaagaggtggccgttccctaccgccccctcctgctcggtttggcggatacgaagcttatttccaaaaggctgtctgacggagaaaagcagatcgaaatcatcttcagagacatattcggcggatggagacgtatcaagctcctgccgattgacggatattcctccaaacaccccttcgttatccccgccttcgacgaacaggacgacaggcagcaggcgcagatgcgggaagatgtgctttcgacactgtgccaatgctactattccatctacctgtttgatttggacaacgatatggaggagtctgtctggcaggaagagtttatccgggaaagccgggaatttcccaaaggcagtctcagtacttactatgataaatttatccgcgatcatgtcttcagcgaggacaaggaaaaaatgcgccgcgccggaagcccggattttctgcgaaacacattgtctgcgcagcatccggtctatgacattgatttcagaaggatttacccggagggccttatctgggtccgttcacgctttagtattgcggaaataaaagacggccgtgtaagtaaagtcatttttgccaatatgcagatacatgaacaaaagatgaaagagctggaggaacagcagcaaaaaaggctgtattttgaatcgcagaatattatcaggggcctgtcggttttttatcactccgtattctacatcgacctgctcacagaatcattccagccatttaatctgatggacgatctggcctgccgtctcggcagcagtacggactatgaatatctgaaaacggtttatagctatttcattcatgaggaagatcggaaacggtttatggaagagctgtcggcttgcgacatccgcagaagaattaccgggggcgatatgatttatgctcttgaataccgcagaaattacggcggtgcctatggatggatgcggatgcatattattcttgcggaaagccgtaatggagtacctgtgaaggtgatattggcagcccacagcgtcgaggaagagaaagagcaggaggagcgcaaccgcaaagcgctgctggcggcatatgaggcagccaaacaggccaatgaggcgaagagcaatttccttgcccagatgtcccatgatatcagaactccgctgaacgccatcaccggcatgtcctccatcgccctgtctcaggccgaagatcctgaaaaggtaagggactgcctgaaaaaaataacgctctccagccatcacctcattgaattgattaatgatgttctggacatgtccaaaatagaaaaaggaaagcttgaactggcagaggctcccttctccctgaaagagctgctgggagatgtggaatcgattctctctcctcaggcctgcgcaaagaagcaggagctgtgcttccataatcctaagtcaccccacgaccatttgtgcggagacgccgggagaatccgtcaggtgttaattaacctgatcacaaatgccatcaagtatactcctgacggaggcagaatcgacatcgccgtacaggaggtttcctcccatcttcaaggatacggctgccttgttttcacggtcgctgatacaggaatcggaatgtcaaaagactttttagattacatatttgtccctttttcccgggcagaggacgccaaagcctgccatatccagggaaccggactcggtatgcccattgcactgggaatcgttacagccatgcagggtaatatacaggtggagagtgagccgggcaaaggcagccgttttaccgtcaccctccacttgaaattattggaacaggaagcagcccttctgttaaaatccggcccatcctcagaccagccggacaacctctgtgactgtatccaggaaatccggaaggcagcggcaggcaggcgcctgttgctggcggaagataacgaactgaatatggagatagcacagacaattcttggcgatgccggcttcactgtggacggagccgtcaacggagaggaggcgtaccggcgttttctggattcagaaccgggaacctactttgccatccttatggatttacagatgcccgtcatggacggttacaccgctgcgcgcaaaatacgttccagtcatcatccccaggccgcggatattatgataatcgccctgacggccaatgcgtttgcggaggatgttacaaaggcactgacagccggaatgaacgatcatgttgcaaagcccattgattaccggaggctgtataaactgcttcttctgtgataaaccgtttatgcaaagatatcgctttcgtgcaatctctcttatatcctggaatgaaaaaaccctgtgccgttggcacagggctaaatcattaggaattcggatttcaaaaaggttaaaggatttaattcatttgtatcgtgcatttattatgtttatagtatagcacgcttctccggaaaatgtttgtatagtctttgaataaattatgaagactttcttaatattgcacttttgactgcaataaaaatgcctctttttgcattatagcagaatcagcacataaatcagccctttttgaacatgtcacagaagtcgaaggtggcaaagtaatcctccggcgtctccgcccgtctgatcatctgcaccgagccgtcctctttcagcaataattctgctgatttcagttttccgttgtaattatatcccatggaaaacccgtgcgctcccgtatcatgaattacaagaatatcgccgatatccaccttcggcagcatcctgtcaatcgcaaatttatcgttgttttcacagagggagcccgccacatcatacttatgatcacacggcctgtcctcttttcccattacagtaatatggtgataagcgccgtacatggccgggcgcatcagattgacggcacaggcatctacgccgatatactctttatgtgtatgtttctcatgaatggcagtcgttacaagacacccgtaaggcccaagcatatagcggcccagctctgtgtaaagtgccacctctcccattcctgccggtaccagcacttcctcgtagaccttccttacaccttcgcctattgcaaaaatatcattcggctcctggcccggacggtatgggattcccacccctcctgacaaattaataaagcggatatctgccccggtctcctctttcagctttacggccacctcaaacagaatctttgcgagcatcggataatattcgttcgtcaccgtattgctggccaaaaatgcatggattccaaaatacttcgctccttttgccttcagcaccttaaatgcttcgaaaagctgttccgttgtcatgccgtatttggaatcgcccggattgtccatgatatcattgctgattttgaacaggccgcccggattataacggcagctgattgtctccggaatatgtcctatggtcttctccaaaaaatcgatatgggtaaagtcatcgagattgatgatggctcccagctcatctgccagcttaaattcttccggcggcgtatcattcgaggaaaacatgatcttctccccttcgaatttcatagcctttgccatcataagctctgtaagtgaggaacagtccgcgccgcttcctgtctttttcaatatatcaatgataaatggattgggggtggccttcacggcaaaatactctctgaatcccttgttccacgcaaatgccttgtttaaacgctccgcattctcccgaatccccttttcatcgtaaagatggtacggggttggataagtctcattaatttccttaagcttctctaatgtgacaaatggtttcttctccattccatattcctccctttgtataaaaagagcctgaaccgcttccggaaactgcttttcctgaattcgggccagactccattgtcctgtagattatttatacactaattttgcagattaatcaaccggtaatcttacaaaaatctcaatatttcttatcaccgcgccgtatcggtacgtaacagttcagccatgatgtattccgcgaggtgttttcgctgtttttttcgaaaatcccgagttgtgcggcgcgaaacggcgttttttgccgtttctgtgcatcatttgttacggtttagccgaaggctggactgtaacatcggtaccgtatcagtctacctcaacaacacgcataatatttgtatcggctgccggtgagtggcggttggcatatgtcaccacgcctgccgttgccacaacaatatctcccgtttttacaacctttttctccttcagcagttcaacagaggagtaaatcaaaacgtctgtcgattcggcgcgctttgcatggtatggttttaccccccagtaaagctgcatctgtctcacggccgacatacttggtgaaagcccggctataagcgcattaggacgccacttggaaagcattctggttgtaaaaccgctgatacttggagcgacaatcacctttgcccccagatcatgcgctgtcgatacggaagaatagcagactgcgttggaaatgttccttacattctcggcgctgacttttctcttctggtaggagagataatccagatgtttttccgaatcctccacgatctggctcatcattctgaccgcctcaaccgggtaatgccccatcgccgtttcaccggacagcatcaccgcatcggttccgtcataaacggcattggccacatccgtaacttccgccctggtcggcctcgggttgcgtatcatggaatccagcatctgggtggccgtaataaccaccttgcatgcctcgttgcatttgcggatcagcattttctggatatagggaaccttctctgccggtatctcaacgcccatatcgccgcgggccaccatcacgccgtcgctggcttcaataatctcatccacattctcaatcccctccgcattctcgatcttggctatgatctgcatcgtggaaccgccttcttctataatctgcctgatttctctgatggcatctgcatttcgtacaaaagaagcggcgacgaagtcaaatccagcctcaattccaaaccggatatcatctttatccttgtcggtcagcgccggaagtttgattttgacattgggaacgttaacgcccttctgctctcccagctcaccgccgttagctatcttacagacaatttcccgtccctttatctcggccacatcgagttcaatcaatccgtcgtcaatcaggattttgtcgccttttttcacatcctcggcaagtccctgataattaatatatcctctcttatcatccccaattatctcttccgtcgtgagaatatatgtttcaccctcctgtaaaataacctttttcccatccttcagctttcccgtacgaatctccggtcctttggtatcgaggagcgccgcaatcggaagctccagttcttccctgacgctctcaagaattttaaaacggcccatatgctcctcgtagtccccatgcgagaagttaaatctggctacatccataccattcaaagcgagctgtttcataatctccctatcgttggtatttggccccatcgtacagataatcttagttttcttcatcggtcaatcttcctcctgtcaccggtttgcatgtttctcacgtactgtgtattactattattgcctcatttcctttaaatcttcctcgctgacatgcttatgagtatataaatgatccatacaatactcaaggccgcccgcacatttggagcagaatcggaattccaggttcggatcatccttttccgttcttccgcagacagcacacttgtggtgtgtcagaagaatcttctgaacctcagcctttttcatctgtgacttaaattcctgttttctctttacttccttcggattaacctgtctgtagtttcttgtcatcaggaagaaaatcacgaaattgagcatggagaggccgatacctatcttcgaaactactccgccaaagaagaagtcataaaggaactgcgcgccgatgaagattcccagccattttgccttaatcggcaaaattcccatcagccagaactgaagctccgggaatgtgacggcaaaggccagaagcagcgattcattcagataatacgttgtcagcggataggaagtccccgttacaaagtaaatgataaacgcagccagaatatgtccgagtacacccatgaaaaagtatacgttaaaccggaacgctccccatgttcgctcaagtgtcgtacccagggaatagtacaggtacatggcaatcaggttaaacaaaatccccgacgccggaggacaaatcaaaaatgtcacgactctccatatctggccgctcagaattgccttagcgtccagcgacagatacagataatagaacatcgggttaatcagattcagcaggattcccgccagatacatcatgataatataatacatcagattgcggatcgcatactttccgtatttatattccagatttctaaaaaagttcataattcacatccttctcttacatttaaaggccgctaaaaagcctttgaattttaattatagatatcctgggcgtctttgtcaaatagagatttagttaagcaggtgaggacgccgccggaacggccagcggacggggtggcggggtgtgtatatgagtctttcgtcccggaggtttggcatcgctggatggagaaggagatactgtggttttgttttcgcagggcggagccggagagaatgatatccggctggactgcttcttcgagggatagctctaagacagaggaaggcaaagcccccggggttacggacaaattcgctccgaactccgaatgagttcgaagctcaagttgtcccggattttgcccttgtaggtctaaaatccgcccggcgcgctttgtctccctctgcctaagagctatcatctctcgggcgaacgtccttccgaatatcattctctccttctccgccggaagatgtcggcagtatctccttctcccggaaggttttcgccaggacgaaagactccgccgggtgtatcggccccgtccgctggcctgcggccgctgagtgtctcacgcgttaagtgcgggggcggaccttgtcgaggccactcagtgctaccgtgtgtgggaaatacgatatgccttcaataagccttttataaaaaatgtggaggatttgataccggcctgccggaaacacgtcgtggccgcgacagggtcctcctcatttaaggttggaggcaatcagcgcccggaacggaccatgtccggtgccgcgaaaacttccgcctgagtcttccgtccctgcgataacctgaaccgggaagtaggcggaatcaattgcggaggggacatgggagtccgccggtgcttggcgaggtccctcacgagcttagcactgttgcgcactccaaagagtgcaaacggtccccgcagcaattcattccggccggattcccccttcacgacaacctacccacggggacggaagactcagacagactccccaccacaccggacatggtccgttccggacgcgtcctccacacctcagttaaatctccatttccaccccagattaacctcttcttaacatgattttaacatccttttcttcccccggatcaatgggcaatattaacggaatcacacgattcttagcggctttttaacgcatcggatcaattgttttctttcctattctatgttaaacttaggccgaatacatgtgtaatacaaaggagggaaggggtaagcccgactgatcatgaattctaagaaaagattaggaatcgatatcggttccaccactgttaagatttccattattgacgacgcaggcaatatcctgtttgcagattatgagcgtcattttgccaatatccaggagaccctctccgcactgctgaaaaaaggtgccggtcaactgggtaatctggatgtggaaccaatgattaccggttccggcggactgactctttccaaacatctgggcattccttttgtccaggaggtagttgccgtagccacatcattaaaagactttgctccccagaccgatgtcgccatcgaactcggcggagaagatgctaaaattatttatttcaccggtggtatcgatcagcggatgaacggaatctgcgccgggggaccggctcttttattgaccaaatggcctccctgcttcagacagacgcatccggactgaacgaatacgcgaaaaactataaatcaatctacccgatcgccgcgcgctgcggtgtatttgcaaaatcggatatccagcccttatcaacgagggcgcaacgaaagaagacctttccgcctctatattccaggcggttgtgaaccagacaatcagcgggctggcctgtgggaagccgatccgcggcaatgtggctttcctgggagggccgctgcatttcctgtcagagcttcgtgcatcctttatcaggacattgaatctggggatgagcagattatcgctccgtcgcactcccatctctttgccgctgtaggcgctgccatgaattcagagggtaaagtgaccgccagtctggagagcctgattgaacgcctctcccacggcattaagatggattttgaggttaacaggatggaacctctctttgaaaatgaagaggcttacgccgaatttaccagacgccacgaaagccacaatgtcaggaaagcggatatctccacttatgagggaaactgctatctgggcatcgacgccggttccaccactacaaaggtggcgcttgtcagcgaagacggagccctgctgtaccatttttacagcaataataacggcagtccgctggctaccgcaatccgcgcaatgaaggagatacacgatgtcattcccgaaaaggccaatatcgtatactcctgttccaccggctacggtgaggcgctgctgaaagcggcgctgatgctggatgagggcgaggttgaaaccatctcccactattatgcggcggcggcctttgaaccggatgtggactgcattctggatatcggcggacaggatatgaagtgcatcaagattaaagacggcaccgtcgacagcgtacagcttaacgaagcctgctcctccggctgcggttctttcattgagacttttgcaaaatccctgaactacagcgttatcgattttgccaaagaggctctgtttgccaaaaaccctaccgaccttggaacgagatgtactgttttcatgaattccaatgtaaagcaggcccagaaggaaggagccaccgtctccgatatttccgccggtctcgcctattccgtcattaagaacgcattgtttaaagtaattaaaataacaagcgctgaagaccttggacaccatgtggtcgttcagggaggcactttctacaatgacgccgtcctcagaagctttgagaaaatcgccggctgtgaagccgtacggcccgatatagccggtatcatgggcgcattcggcgcagcactgattgccagggagcgctacgacggttctaagactaccacgatgctctcaatcgacaagatcctgggcctcacctatgaaacgaacatggccagatgccagggctgtaccaatcactgtgtgctcaccatcaaccgcttcgacggcggccgtcagtttgtaaccggcaaccggtgtgagcgcggtctcggaggcacgagggccaaacgtgatgttcccaatctttttgaatataaataccacagaatgttcgattttgaaccactgacggccgatatggcccgaggggaaccgtgggaatcccgcgtgttctcaatatgtatgagaattatccgttctgggctgttttctttaaaaaactgggtttcaggaccgtcctgtcccccagtccacaaggaagatttacgagctgggaattgaaaccataccgagtgaatccgagtgttaccctgcaaaactggtacacgggcatatccagtggctgataaagcagggcattgaatacatattttacccctgcattccgtatgagcgcaacgagtccccgacgcaggaaatcattttaactgcccgatggtcacctcctacgctgaaaacatcaagaataacgtcgaggagcttaccgaacataaagtaaaattcagcaatccttttatggcttttaccgatgaggaaatcctgacaaagcgtctggtggaagtattccgtgaagacttttccatcccggaagaagaagtacgcatggctgcaggggaaggctggaaggaactgattgcatcccggaaagatatggagaaaaagggcgaagaaaccctgaaatggctgaaggaaacaggcagacacggaattgtcctcgccggccgtccatatcacgtggatcccgaaattaaccacggcataccggagcttatcacttcctacggctttgccgtactgacagaggatgccgtttcacatttgggaaaggtggagcgtcctttaattgtcacagaccagtggatgtaccactccagactgtatgaagccgcctgctttgtaaagtcacagccaaatctggatttgattcagcttaattcctttggctgcggactggatgccgtgactacggaccaggtaaatgaaatattaacccgttccggcaaaatttacaccctgctcaaaattgatgaagtcaacaatctgggagccgccagaatccgtgtgcgttccctgatttcggcaattcgtgtaagggagatgaagcactaccgtaaacctgtcgtatcaaacgcgtacagccgcgtcttcttcacgaaggaaatgaagaaggattatacgattctctgcccgcagatgtctccaatccattttgaactgattgagacggcggtcagaagtttcggctacaagctggaggttctgcagaactccgaccgcagggccgtcgataccggactgaaatacgttaataacgatgcctgctatccatccctgattgtagtgggccagatcatggatgccctgctttcgggcaaatacgatttaaaccgtacggccattatcatgagccagaccggcggtggctgccgtgcatccaactatatcggatttatcagacgcgcgctggagcgggccgggatgccacagattcccgttatctcactcaatgccaacggtatggagacgaatccgggctttaagattacgctgcctctgataacaaaagcaatgcaggccgtggtatacggggatctcttcatgcgtgtcctgtatgctacaaggccatatgaggcaaaacccggttctgccaatgcgctccacggcaaatggagggacatctgccagaaatcactgtcgcggcgcgcaccgacgatgcttgaatttaacagaaacatccggggcattatcaaagatttcgatgaactcccgcggaaaaatgtaacgaaaccaaaggtgggaattgtcggtgaaattcttgtgaagttctcccctcttgccaataaccatgtagtggaactgctggaggcagagggcgcagaggccgtaatgccggatctgctggacttcctgctctactgcttctacaacagcaactttaaagcagataacctgggcggaaagcgctctaccgcatatctttgcaatatgggcatttcgctgctcgaatatttccgcaggacctccaggaaagaactggaacggagcgtccacttcctgccccctgccaaaatcaatgatctggcatccatggcagaacattacgtttccatcggtaatcagacaggcgaaggctggttcctgaccggagagatgcttgaacttattaagagcggtacaactaatattatctgcacccagccgtttggctgtctcccgaatcatattgtgggcaaaggagttatcaaggaactgcggagcagccacccggaagccaatattatcgccatcgactatgatcccggcgccagtgaggtaaatcagctcaaccgtatcaagctgatgctggcaacggcccagaaaaatcttaatacaaaggtagatgtttcatgacagaacatctcaccgtcttcaaagaggaggcagtgaaaacgttataatcgtttttcactgccccctttttaccgatgcttcctgaatcggtaactttttacttacattcttccaattttttgctgacatttttcttaaggcatgatataatggacggagatatttactatgtcccgttttcatggcgacaaatacggagggttgaaggatgcgattcaggactattatctgtaccgcactgttggcgctgacattctctgtcaccgcattcggtgctgaacatactgcccaggttgtaagcttcggtcatagcgttgataccgatgctgccattgaacttaccggttcaaaggttattacagacgatttttcttttaaaatgccggacggttggtcgggtaactgtgttatggtagccgacggttccagttatgagatttataataagactgcatatgaagaagacggctccggcctcctcttttccatcatctgttatgaagatgtcgattatcaggatttgaaaggttgttccatccttggtttttatggcaataagacctacatattggaatcatggtatgacgaatttctggaagacacgacttccagggaatataaagcatgcgctgaggcttccaaagttctgaaaaaaagttttgtatccatagtgaaagaaccgacagaataatctgccggttctttttggtttaacaggaaatgtctcctgttaaataaaaaccgctccgcggaggatcgcactgcggcggcagggaataatgccgccacagcgacccgccgcagacttagcttatcagctaattcccttaatggcccactggtatgaagccaccgcctgcttataggcaatttcagcacttttataggcggctgcggccgaataccattccgcttctccggacagccaagtgcttttatttatcataccggccccgtattttgtcttaaccgcaccgtaatctttttctgcagccgcataggaggcgccggctccctcataaagctgctgcgcttctattacagcccggtacaattcatccattgtcagaccggccgctccttccgcctcatatagctgctgtcttctcagctttcgggcagtgtctccggtcgctgtgctcttcttgattgatttgacttcgggatctgcaattaccgctttcgctttatcgctttccaggttcatctgttcaagctccctggatgtcacggccggaatttccccaatctgaaccgtttcagcatctctgccgatcagaatggcaagctggcgtttcagcttatctgcactgtcccggacagactgcagggatgcctgggcatttaacagacttttctcagaatccagaagctctgtttctgtaataaggcctgcctgtctcctggctgacgccagttcataggcggcattttgagcctccgccctcttttcggctgcccttacctggtactccatcttcttaaatgagtacatcagcgtctgcgccgattttacgagactgttgattgtccggtccagggatgcctggtttgtggcggaattgagggaattgatgcttctcttcatctgagcagccgacgaggacagaatctgtgcattctgttcataactttcaatcagggccgcatccgcgccctcatcctccagttcatcggctttatttaacatatcccgtttggcgcttaccagagaatcatatgcagcctggtaaacctccagcctggtttcatagctcttctgcgagttgacggcactgctgttgccggtccggataagtgattccagctcttcatattcaatcaggccgtcattcagattttcctcactgattgatgcggtaacggtttttatctcctcctcttcattaccggctaacgccgggccctcagcctcccccggttcttgaagtcctgatatcagcgggccggacgcctgcgccggaaactgatacaggaggctgaaagcagttgctgccgccgccgcccagcctgcgattttgcgaatctccattctgcctcctccttatactgtcgatgccagaccgtccactgcccagcggtaagactgctgcgcctccaataatgtcatggcagccgtttctttctccgttacagcattgttataagatatctgccggctctgatattcattcaggctcatagtcccggccgctcttttgcgttcggccgcctgcatggtcttttcctccagctcaaagctttttacggtctgggcatactgggtttctgccagcaggagactctgccaggctgatttcacattggcctttaccgcctcctcactgctttttaacgtttcctcgtactgccgctgcgtggcgccctgcctggcattctttatctgcctcgataaaattttgatgtcataattgttttcaactgcctttaccagatcctcgtcgagattgacagagctgctcatcgcaggctccggctccggcagttctcctatctcaacctcgtccccatatttccatcccaacatcagacagagattctcctttgccgatgctaccgcgctttcagccgatgtaatggccgcttccgcctgcataaccgcatccctggcgctgaggacggcagactgcgccgctgttcccgccgctgcctgaagccgtgtcgtctcatatgatttttctgccgttgttttagcgtttctgctgctgtccagcgaagcctgcgatttccagtaagtaatcataagaatctgggcagactggacaagtgatttttccgtcttatcataaccccatttcaccacatcgccgtcggtgacattttcgtctcccctgtcgatcatctgctccgcctgaagctcgctgctctgtgccgcggccagtcttgtaccgtagttggcatcatccgaatccggatactcaatgccggcataaatttcgtcggctgtatcataataggtccgggctacttcgtcgctgtccttccccttataatcctcataggcaatttggttgctgagaacggtgctgttgtattcatgtatcaaatcgccaatctcatcatattccagtttattgtcccgcagggaatcccatttttcctccgtatacgcaaatggcggactggccgcctgcgccgcctgcgggacggcgaaagagattatggctgttcccgccgccagaacacaaaaccgtgtctttattttattgctttgcataaccggttttcctttcctcaagtttttattaaccatccgtcgcaatctaaccattttaatcaatatcctggaattcctctttcggtctacggctcaacaatccgtaataaaccggcagcataaacagggccacgataacgccgaccgccaggcctccaatatctacaatcgctataccctgggttgttgaaccgctgcttccgattgccagggccatcgggatcatggacaggatcgtcgtcaggctggtcatcaggatcggcctgatacgcgtagcgcccgcctctaccagggccgtatgtaaatccatctcctgccggtactggttcaccgtatccacgtacaggataccgttatttacgacagttccaatcaggatcagaaaaccgagcagggttgtcatactgattgtgacgcccgttatcttcaggaaaccgaaggaaccgacaaggctgaacggaatcgtcgtcatgaccatcaccgaaaattttacggattcaaactggcttgccatgacgacaaacacaaggaacactgcaatggcgattgccgaatacagggagccgaactcctcctgcatcatcctgtcccggctgttagttcccaggctgatagttcccgtcaggttaggcgatatcacttcactgtcgattgccgcttttgtattaccgcctgtataatctccgctgatagtaatctcatacgctttgtctgtctttgagatagaggacgggctgtctttgaatatgacatcggccacctgggtaagggcaactttttggccttttgaatccgtcagtataatatccttaacctgatccacagtcctgtactcatcctccggatattccacctgtacggatatttcttcaccgtccaccttgagcgtggctgcctccacaccgctcagcatctggttgaccgttgagccgatggcggaagccgtcagtccgtgggccttggccatgaccggatctactttcagtgtaacgatcggagcattattttcgatactggagtgtacgttgataatatcgtccctctccgtcatctccttcacaatcttatcgcttacctctttcagctcatcatactgggtaccgtgcagcagcacttcatatcccctctgaccgcccataaagctcatcgaggtggaggccgatacatcgatggtacagttctctatgctgtccatttctttctgccacagttcggccacatcttccgtatccatttttcttttatccttcagataggccgtaatgctgccgctgctgctgttgaaacgcagcatataggaatccacattttcatccgccgccacaactgcctccgcctgctccagggcatcatttactttttcctgcagaagacctggccgcgtctcaatgctgacgctgaccgttcccgtatcatcggatgtcatcagttctgcctgcatccccgacgccagatagacggtagccgccagaatggcaacagatgcgagcataaccatacccttgcgttttaacaatttctccatgacctgtcggtagaatctctgaaaacgctcaatcggcagggacatcaccgccttttgtgtttctgccggcttgtagaacagataacagagcggcacgattgtcacagccgacagcagggatgccgccatacagaatacaacggtatagccaagtggcttaaacatctgccctgtcatgccctgaatgccggccaggggcaggaatacaacgcaggtggtgatcgtggagccgataattgaattacccacaagcgccgtcccctcaagagccgccctgctgtagcccagtattcctttgtccctgcttccggccgtcgctctgaaacagctttccaaaaccacaatcgagttatccaccatcattccgacgccgagaaccaaagcactcatcgtgatgacgttcagggagaatccggcggcagtaattgcaatcagcgacatcagtatggaagtcggaatggaacttccgacaatcagtgacgctttataatctccgaaaaacaggaagataactatcatggatatgataacggccagcaccatggtgacggctacatccatcagtgagtcgagaatgctctccgatgtgtcatttgccacgttgatgtgcaggtcttcgtccccggcttccagtgtggcgatgacgctttttaccgcactcgaaacctccattgccgtattgctctgctgcttagtaatggaaagggatatcgtctcctccccgttatagcgggagacgcctcccctgtcttcctttgcctcatagatattggctacatccgacagcataaccagctctccggtggcggtagcaattggaatatccggcagttccccgacctgctccgtctccagggatgtcgtcacagacaattccaggtttcctgccacggcttctccggagggatatgccagattggccgtgctgatggccgaggttacgtcgctcatggtcagaccgtactgctccagcttttcggacagcagctctatttttatatattcggaagaaccgcccatggcgctgacctccgctacggatgatattctctcaaattcggggactatattctgatccacatagtcataaagattttcctgcctggaatggcttatggaaagcatcatcgtggtcccggcattcatgctcatctccatgatggaggtgtccacatcgtcgggaatgttccgtttggcattctcaagcttctttttcaggttgtcataggcctcatccatatcggttccgtaatcgtactccagcattaccatggcacttccgtcactcgatgtggaactcatggttttcacgccttccagcgtgctgatggcatcttcaatcggctccgtcacaagctcgcatatatcttcagggcctgcgccggaatagccggccctgacaatcagcatcggcgtctccatatccggcatctgctccagctttgcggagaaaacggatgtgataccaaacacaatcaggcaaagaagcgccattactgtggtgaccggatgcttaaggacgtattttgtaattcctgttcccattaattatctcctcctgccctattctgccgctgcagaagtctcagtcctgcccgttcccggttctttgccggccggagcggattccccgccctccgatttaagattgaccgtagaaccttcatagagctgggagctccacgtgctgattaccagttcgtccgccgcgagtccggaccttatctccgcaagctcagaatcataaagccccacctccacttcttttttgtgaacggcgccgtcctcataaacatagacatttcccacaccgccgtcatagtaaatggcatcgaccggcaccgtcatcacattatccgaacgcccggaaatcaccttcaccttgacgacgcttcccgttgcaaccgaatcggcctgcgccaggtctgcctttattttaaacagtccgtttgaatcgtccaccatggtgctgatatcgtttatgaccccctcataagcatttccttctttttcaacggtcattttgtcccccaggctgagattcctgacaacgccttcggttacgtaaaaggaaaccctcttattcccctgaccggagataacgcatagctgatccgactggtttacgcggtcataaacctccaaatcgcagctctcgatcttccctccgatgggcgctgtgacagagctgtactccacctgcttttcataggacagtttcgccgactcgtactggagtttcgcacttttcacattgttctggtactgctcccattcctggtcggagatatcgccgccctgatagagaagctgcatcctgctcagtgtgctttgggcctccgacagggaaatcgccgccgcatccatggagtttttggcactgtccacctgttccgtatcaatcgtgcagagaagctggcctgcctgaaccgtatcacctgctttcacaagaaccgaggttacgtcacctcccgccttggcgtaaacatatacgacatccgccggctccaccttccccgcaaggctggtcgttttttcgatacttccggtttgaggcgccacagccttcacggttgccacattgttcatcgtctgctgccccatcattcctgccggcatggcattctttttacctcctccggctgctgccagaacgattaccgtcacggctgccgccgtcaatttcttcctttttccggccgattttatcaatgctttcactcttccttttatcatgattcttggtcctcctcgatgaccggtgcgggaatttcccttcacctcgggtttcaaatttaactgagtataccacccctctttaaatcgaaattaaactgagcattaactggatattaacaaaccgtgatttttttgtgttccttctgcataatgaatgaaaaattcaaaaatggcgctttgggtttataattagttcataaagatgtgatatgaattttagaagcagtgatttacattatgaacggaggataaatctatgttccatattcttgtcgtagaagacgacgcaaagcttcgttccctcttctgcaccgttctgaaccgcagcggatacctgacggttccggcatccggcggcagagaggcgctcgaacttctggattccgaatatatcgatttaattatttccgacattatgatgccgggaatggacggttatgagctgatccggacgctgagggggaacggctacagccttcccatactcattattacggccaaagaacggtttgaagacaaacaggagggatttcaggccggtactgacgattatatggtgaaacccatcgatgtgaatgagatggttctgagggtcggcgccctgctgaaacgggccagaattgccacggaccgccgtatcatctgcggcaaaacaacgcttgattatgatgcgctgactgtcaccgtagatggggaagaaacgctgcttccgcagaaagaattctatcttctttacaagctgatgtcctatcccaataagattttcacaagacagcagctcatggacgagatatggggaatggactccacttcggacgaacgtaccgtggatgtccatattaaccgtctccgggagcgttttcgtgactgtgatgattttctgattatgaccgtgcgaggtctcggatataaggtggtgaaagcagaattatgaaaaaaaagaactttcacctgcctaagtactggttttatatgctgatactcagttttgtcatactgtccgtaatgccgctgatggccggtttcctggtgaatctcatcgcaaacggcgaggagggaaaaatccgttttcttcagtttaatccgctattcccgagccttgtattttttctcagcagtatttttatcagttttatcatatcgctggtgttgtggtttaaggttctcgtccccctgggtaatctcagccaggctgcaaggcaggtgtcaaagggcgatttttccattaaggtggagaccggcaaatccctgcgcgaactgagggagctgaccgacaattttaacaggatggtgcaggaactgggcagtatagaatcgttcagaaatgactttgtaacgaatatttcacatgagtttaagacgccgctggcggcaatcgaaggatatgtcaccctgcttcaggagccttcccttaccgaggaagacaggaatgaatatatccgcattatcatggacagtaccaagcagctctcttcgatggcaggcaacattctcatgctgtcacggcttgaaaagcaggaaatcgtgaccggaaaaactctgttcaagctggatgagcagatacgccagtcccttctgatgctggaacccctgtgggaaaataagtatctggatctcgatatcaacctgccgccggtgcgctatttcggcaatcccgatctgctgatgcaggtctggctgaacctctttcagaacgccatcaagtttacgcctgcaggaggcagcatctccgcttcgatgaagctttttcctgattttgtggaggtagtgatttccgatacgggaatcgggatggatgaggaaaccatgaggcggatatttgagaaattttacagcgcgggcagggagctgggacgtagcggaaatggcctgggactttcgattacgaaacggattctggaactgtcgggcggtacgataaccgttgagagcagtccggatgaaggctccctctttactgttacgctccccctccgagaaccggatgtcaggtccgttatggtatgatgaaacagatagatataccatgacgtaaaacagacaggaaatcatgtcgggcgcacctcgatttagaggcgtccgacatgatttcctgtctgttttacctgtataatttaaagcggttatacccgtcttccatttacttattacacatttaccgttttcccacgtatgccgcatacatctgtgtggtagccacatccgaatgccccagtatcacctgtacggctttcatatcagctccccctcctatcaggtgtgccgcaaatgagtgccgcagcgtatgcggtgtgatgtctgattcgattcccgccttatcgccgtaaaatttgattatcttccagaaaccctggcggctcatctggcctccgttgcagttgacaaacagccagtccgactctttttttctcgtcagctccgaacgggcattctctatataatcctccattgctcccttcgccacccggctgaaaggaattgtcctgtctttcccgccgtcgcggcaggtgataaagccgatattcatattgatatccgtcagcttgagactcgtcagttccgagacccggatacccgtagcatagagaagttccagcatcgccttatcccggatctcttttgaagagcgcccggaaggctgcttaagcagtgacgtaacttcctctacggaaagtatcaccggcgctttcttttcaatctttggagcatggacaagctctgcaggattgcgtctgattttaccctctgaaaattcatagtgaaagaacgccttcatggatgccagcatacgcgatatggtagtggtagcctttccttctttttccataaaaagaatataggaagtcagactggtcttcgttaccttcccagcttccgtaattcctctttcccccatataggatgccatctgaagaagatcacggtgatatgacagcaccgtgttccgggacatctttttgacctcctgcaggtattttatgaaaatatctatctctgttaccatactgcttcccctatcccttacgattcacccttgcaggcttttacagggacaatcatcatccctccaaaacaaggccaaaaacagcctgtacgtaacattatatatacattttttgataaaatcaaacacatttttcccacttttacagtattttcaggctgattaacataaaaaatacaacatgttggaaggcagtttttgcctcccctacatgttgttaaaaaatttttaaagattttttaatttttttcttattttccttaaaaaccggacgcaaaatgcaggaaccagggattcagccacagttcagacgcagcccctgctgccgtcagaataagaaggacggcaaagcctccgccgtgaattttatttcccggagccatcgcccatatgtagagaaccgccaataccggaagataaaatatcatctgcgggaatacggaaagcaggaagagaaatactcccatcagccccgcctgcaccgtcattgaggatataagaaatgccatcgaaaaaccggcgtagacggccgccaggcaaaagccgggaacggcaaacaatgacatcccgagaagccataaaattccgattccaaggctccttttaagcagcagttccgccagcagctccagggaaggaggctgcgtactccccgtcagaaacgcctgtccgaatactcccagctgctctttgagacctgcccccatcctgtttacccacatggttccggcaaatatcccggcaaaaaaacagaacaccgttagaatggacggttgaaaacgaaacggtgtatgatattttcccatacaaaagtacctttcccgttttttccagtctatgcggcgttccgtctctctattcacagcagtttatcgtatcactgtatgccatctgaacggctactgctatctttcgttactgttcacacggcatgcatatgccagaatggaggcaactgtctttccgtccgtcatctttccggaatatatcaaatccaaaagatcactcagctcccattcctccacctctatctcctcatcgggatccagatgctgttcggatggaatcaggttccttgccagaaatacatcgatcgcctcatcgcagaatgcaatcgtggtattgaggctcagcagatattccagtttctctgtcttaaatccggtctcctcctccagttccctgtaagcgcagtcaatcataggctctcccggataatccagcttccccgccggaatttccagcgtataacggtccagtgcattcctgtactggcgcaccataaggagtttcccgtcatggttgacagccacaactgcagccgcaccgtcatgatggatgaaatcccattttgcttcatgaccgtttacattaaccgtatcctcgtacattttcaggatagttccctgatatttaagttctcttttcagcctttgcaccgggggatattctctcccctcacttcagacccggcagaaaatgtttcttcttccttctctttcatatggcatgccgctccttctgtctattgaattttcatatataacacgcggaatacaaccgtgtgaacaatactaacattatttcaaattcgtgcatttatcatagcatgcatccgaggccttcatgacggcgttcctaaagccgtattcctcgagggcggatacggcagcaattgtcgtacctccgggcgagcataccttatccttcagcgctccgggatgctctcccgtctcaagcaccattttagcgcttcccaggactgactgggccgccatcttataagctgcctctctcggaaggccgtatttgaccgcgctgtccgccagagcttcaataaacatatagacataggccggtgagcttccgctgacgcatactacggcgttcatcaggcgctcttccactgtctgcatttttccgaaggattcaaacagtgaccggattgtctcctgttcctctttggcgaaaagagccgggtcatagcagacgcctgtcattccttcacccagcagggccggggtgttcggcatggcccggacgattctcttatctgctcccagagtttccctgatgctgtccaccgtgataccaggagcaatggaaataataatatggtcttttgtcaccgtaccggcgatgtcagaaagcaccggagcaaagaactgcggtttgactgcaagcactatgtatttagccgaagctgcacattctgcattgcaggccgcaaaggaaactccagtctcctctgaaacctgccggcatctgccgggattgacatccgtaaatataatctcttctttcccgtatacgtttaataatcctttcagaatcgcatatcccatgttgcccattccgataaatccgatttttgccatatttctgtcctccaatttgtctgattaccaaatacgcacgccgtcgccgttcaccatgtggccgtccggtgtctggaagttcgtctgcatgtctccgtcaggccccaggtaataccagagttccttccactgtatccatcctgtggccatatagctgttttcgccgaaataataccacttattattgataaacgcccagttattcaccgtataggaaccgtccggattgagccagcgccagccggtctcatcctgcacccactgtcccggggtattcccgttgttgccgtccgccgctttgctgttgcctgcacttgccaaggcctgcgcctcagaagggctgacataccggcttgccgactccgtgtattttccttctttgcttccttcggcgcccacagcgcgcactttataatagtactccccgtcttttcggatggctgttccgaaatcatacgttgtttcggtggtcgtcctcttgctccccacagctttgctgtcgcggtaaagataaagctcataggccaccgctccctgtgcaggagcccatgttgcaaccgtcccgttcagataagcgtactcaatcgggccgactctctcagccatcggcttcagatcgagggtaataatcagtgtctgggagtcttcctttttcgtggaaaccacctttgccgcatctcctttaatctttactttatccttagatacggaaaaataatagtcatcatctgcggtaacggtcaccttcacacgaggcttatgctctgaattccaggtaaaaccttcattatcgatctcccactccgccacgccgtaactgtcggcgcttgtctctatctccagctcatcctcttcatccagcgcgctgccaagctgcaaattatccttgacttccagcttgatcgctgttattttttctcctttggccgcgaaggacgtgattgtaaataatccagtcatcatcacaagcgttatagccgccgtataccataccctgcctctcctcatgaaaatctcctctctaaaacgtataagccttccggtacccatatccggatttctctgtctgtaaccttttctaattaataataccgcactattttgcaatattcaaggtaaagctgtgaccttccgcctgcatacggtctattttcgttcgtgttcacagatcaatgtctttagttaagcaggtgaggacgccgccggtacggccagcggacggggtggtggggtgggtatatgagtctttcgtcctggggaagcttgtcgtggtttggggctgcgggcgaagataaagtctgcggccgctgaatatctcacgcgttaagtgcgggggcggaccttgtcgctaccgtgtacagaaaatttggtatgccctcaatgtgtctttattaaagaattgcggaagctttgatatcggcctgccggaaacacgtagtggccgcgacagggccttccccatttaaggttagagacaatcagcgcccggaacggaccatgtccggtgtcacgaaaacctccgcctgagtcttccgtccccggcgaaaacctgactgggggaaggaggcggaatcaattctggaggggacatggaagcccatccgtgcttaatgaggttttttcgaatttagcacggctatgcgcttcgataagtgcaaacggtccccgtaagaattcattccggccggattcccacctcacgacaaccttcaaccagtgacggaagactcagccagcccccacaccggacacgatccgttccgaacgcgtcctccaaacctcagttaaataacagtaacctatttccaggtgacatccgctgtttttctgggggccgttctttggtaaacgacatctggatacccaatcagcagacagcagcagacattctttcccgaaagtcccagccattcggcagcctccggattctgccggactgcccgcaccataaaaccgttatacagtacgccaagcccctctgcaactgccatcatctcaatattctgcgctgcaagccctccgtcccaggaattctcagtagcaattaccagaaggaccggagcattaaaaaacaggcggtcctgcctgggatccttttgatatgcctcatagaatttatatatggcggcttttaagtctgcctgttctgagggaagcgtatccgcgtaagacagccagcccttccatgcgtatgctttaaattcctcaagtttctcctgtacaatcacatagctcacactctgcgtgttaaccgccgttgccgtataccggcctgcttctatcagtcccagaagctgttcccgctccacccggcgatctttgtagcttcggatactcctgcggaatttcactgcgtttaaaaagcattccggcgtataggtaaagctgtccttgtcatactccgccacatccgccatatcatattccggtattgacaccgccttaacgggacatacagccacacaatgcccgcactgcatacaactctctctaacagccgcttttccctgatcaatatgtaatacacccgaaacacaatccttcacacatttcgcacatcctatacataatgactgttcaatttttaccatatattatcctcctttgagattttacggcaggaaaattctcctgttaaacgataacctgcatgcgccgcgcaggtcaccgccatcaataaaaaatgccccaatccgcacaaatactagttttctacggtttggggcatttattgtctcactctgaataattacttcgcataatcggtgactcttgattcacgaattacattgaccttaatttggcctggatactgaagttcttcctggatcctctttgatatatccctagccatcagcaccatatcatcatcgctgacctgctcgggtactaccataatgcgaacttcacgtcccgcctggattgcgaaggacttgtccactcccttataggagtttgtgatatcctccaactgtttcaaccggttcgtatatgtctccagagtttcccttcttgcacccggccttgcggctgaaatcgtatcagcagcctggatcagacatgcaataaggctctgcggttcaacatcgccatgatgggcctctaccgcattgattaccgttgccgactctttgtactttctgcacagggcaacacctaattctacgtgagtaccttcctgctcatggtcaacagcttttccaatatcatgtaataaacctgcgcgttttgccgtgcggacatctacgcctacctctgcggcaagcagtcctgccagctgggctacttcgattgaatgctttagtgcattctgtccataacttgttctgaacttcatcttaccgagaagttttacaagttccggatggattccatggatgcctacttccagaagagctgcctctccttcttcgcgcaccatggtttctacttctttctgtgctttttctaccatttcctcaattctggccgggtgaattcggccgtccacgatcagacgttccaaagcgattcttgccacttctcttctgatcggttcaaatccggaaagtacgactgcctccggcgtatcatcaataataagctctacgcctgtcagtgtctcgagggtacggatattacgtccttcacgtccgataatacgtcccttcatctcatcgttggggagctgcaccacggaaactgttgtctctgccacatgatcggcagcacagcgctgaatggccgttacaacataatctttggccttcttgtcagcttcctccctggcttttgcttccaaatccttaatcagtttagcagtgtcatgttttacatcttcctcaacggatttgagcagatattcctttgcctgctcggaagtaaaaccggaaattctctccagttcctgcgttccctttacatagagttcttccacctctgcggttctcttcttaagggcctcttccctgtttgccagacctgcttcccgtttttccattgcttcggacttcttgtccagattctcttctttgctcagtacacgtcgttcatagcgctgaagctcagctcttctttcctttgtttctttctcaagctcattctttgtctttaaggactcttcctttgcttcaaggagagcttcacgcttcttagtctcagcaacttttaatgcttcatctattatttcccttgatcgttcctcagcactgccaattttcgtttcatacgtcttttggcggtagttggtggccacaaaccaagtaataacagctacaataatactcgcaatgagcggaactattacttgtgacacaggagcacctccttatttagttttcattgtacaagaatacaacgatttaattttaaactgttttatacattatgtcaagtatattagaatctgaaaccctgttttcgtcactatctaacaaagctggaaaaacgttactatatcggaggctattcctcctcaaaggcccccatggcactgcggatatcctcgaaggaaaagcctttcctcagcagatatgccatatgcttctgctgttctttcctgtcggtgcattccggatcgtaccgtctttttttcaacaggtttttaatctgtccggaactgtcgggctgcagttcatcgcaaaattcaacaattgtctctttatcgatcccttttctcagcaaagcagtcatcaattcggtccggctcttgcggctgccgtataattcaatatagttccttgcgtattcacggtcatccagataatgatatttattaagaaaggacaccgcctcctcgacagcctcttccggataatggcctgacctcagcttctgcctcacttcgctttccgtctttccggaactcttcagaagatagagcgatttctccctggcacgtttgcagatcacgccgtgtaatatctcctcatacactggttcagatatatcctgccctgcttcaatatggtaatgccgtatctccccattatataaaacaaaggcaaagtccccatcaatgaagactttgctccttcgtttatcaaggggctcaattttgtctaccgtcattcttaagccctttcgcaattattccttatattatttacttattttgccggattcttctgtgcaggctccgcgtcggcctttttctcaaccggggccagccctttgtccttcttctctgccgtatctccggcaggaccgtccgccaatccgtatttttggcgtacctttgtttcaatctccgcacagagttcctgattggccagaaggaaattcttggcattctcccggccctgtccaatcttactgccgttataggcataccaggcgccgctcttctccacaatatcttccttggcagccaaatccaggatatctccctctttggagattccttttccaaacataatgtcaaactcagcctctttaaatggcggggcaatcttattcttcacaactttcacacgcacgcggtttcctatcatctcgccgccctgcttcaatgtctcgattcttctgacgtccaatcggacggatgaatagaacttaagggcacgtccacccgtggtggtctccgggttaccgaacataactccgaccttctcacgaagctgattgataaagataaccgtacagtttgatttgctgatgacggctgtaagcttacgcagcgcctgggacatcagcctggcctggaggcccacatgggaatctcccatctcaccgtcaatctccgccttcggcaccagcgccgccacagagtccacaatcacaatatcaaccgcaccggaacgcaccatggtttccgtaatttccaatgcctgctctccgttatccggctgggaaatatataaattatcgatatctactcctatgttgcgggcatatacgggatccagggcatgctcggcgtcgataaatccggcaattccacctctcttctgcacttccgccaccatgtggagggcgaccgtcgtcttaccacttgattccggtccgtaaacctcgacaattctccccttcggcaccccgcccagtcccagcgcaatatcaaggctcagggagccggtcggcaccgtctctatattcatgttggccccggaatctccgagcttcatcacggagccctttccataagctttttctatctgtgtcagcgcggcatccaatgccttcatcttatcatctctgttcatctcatcctccaacgattttcaatgcgaacaaacgttctcttcatgttcttataatagtataactgacttaaaatgtcaacccttattttccaatacagcagacagtaacacagggattacgcgaaacgaagacggggccggacggacggcctgtcatacaaaaaaagatactgaattgcggcagaacttgcatatctgatttttagaagtaaggaaattatatcatttcaaacgcctcttgtccataaagtttcctgtttatggttgaatcattacattttcttacgttgacatccagggcggttctttatataatcaataggcaataataaataatatcaaattcaggagctaatacaataatatgattggaaagcaagtgtggtcgctgactccggccaagataatccttggcggttttttcctcattattatcacgggagccgttcttctgacccttccttttgcatcgaagaccggtgaagcgactccatttatcgacgctgtgttcacggcaacctcagccacctgtgtaacaggcctgatcgtccatgacacgtacacctactggtccgtattcgggcaggcggtgataatcatactgattcagattggaggcatgggcgtggtgacgcttgccattgccatcacaatcctgtccggtaaaaagatcggcttaaaacagcgttacgtaatgcaggaatccatctcggcgcctcaggtaggcggaattgtccgcatgacgagttttatcgtaaagggaaccattttttttgaggccgcaggagcggtcatcatggcgtttcagttttgtccgcagatgggccttattaaagggatctggttttccgtattccattccatctcggcattctgcaatgccggatttgatttgatgggaggcaccagcggtcctacgacttccatcaccagctacaccggaaaccctcttatcaatattccgatcatgctcttaattataatcggaggtatcggtttcttcgtctgggacgacgttaaaacccataaacttcagcataaatattatcatctgcagacaaagatcgtcctcaccacgaccttctgcctgattatgtttccggccctgttcctgtttctgtttgagttttccagggactgctgggatggactctcgctgcaggaacgatttatggcttccctgtttcagtccgtcaccacccgaacggcaggctttaacagcgtggatttgaatcagctttcggaggcggcccagctgctcgtggtcatactcatgattatcggcggttccccgggctctacggcaggcggaatcaaaaccacgacgtttgcactggcatttctttgtctgcgttctgcgttccagaaccaggaaagcatccagtgctataagagaaggataccttatgatatcctgcgaaatgctattgccatactggccctttacatctcactgatgctgacggccacgttcctcattacctggctggatgacgtgaatctgatggaggccgcttttgaaacctcctcggccgtggcaaccgtcggactttccctggggatcaccggggatttaagcactttttcaaaaattattttaatattattaatgtatttcggccgtgtaggcggcctgaccatgctttacgcactgacaaaccgaaagaagcttccggtgctgcttcctcaggaacgcatcaccgtcggctgattatcatgatatctggaggatatattaatgaaaactgtattaatcatcggtcttggccgtttcggctccacaatggcaatgaagctccatgagctgggtcacgaggttatggctatcgacacttcggaagacaggatcaacgccgtccttccgtacgttaccagcgcacagattggcgactgtgccaatgaacagtatatgaattcccttgggatccgcaacttcgatgtctgtgtagtggcgatcggagataattttcaaagttctctggaaatcacctctcttcttaaggatttgggggcaaaatttgttctctcccgggcaagccgtgacatccatgccaaatttcttctgagaaacggcgccgatcaggtggtttaccctgaaaaagagatggcaatccggtcagccgtccgctacagctccgataatattttcgactacatcgaactgactcctgaacattccatatatgaaataccagtccccgaaggctggatcggaagaagtattattgaaatgaatatccgcaaaaaatataacatttctattttagcggttaaatacaatgacacccttcatcccctgccgggcgctgattatacctttaaagcaaacgatgaactgattattctcggtgcaaaccgcgacataaaccggtttgtttattaaataccgcagctaaccggcccgaacgggcccaggctgccgtcttcaatgcaggcagagtgcggacgcttaccggcgtaccgccctctgccttttatgatcgtctttttcctgtataatcttaccaattccggtaataatccaatcaaataaataactgcggaggacatcaaattgagaataccggagcatgtggggattatccccgatggaaacagaagatgggcgcttcaaaagggcctgaataaagaagatggatatgagcgcggcatttcacccggcatgtctttattccacacctgccagaagctgggaataaaggaaatgtctttttacggatttacggccgataatacgaaacgtccttccgtacagcgcctggcctttacaaaagcatgcgttgccgccgtaaaggtactttcggaggaaaacgcaagtcttctggtggtcggcaatacggattccgcgatgtttcctaaggaactcctgccttacaccacgagacgggatttcggaaaaggtggagtgaaaattaattttcttgtcaattacagctgggaatgggatttgggattaaagaacgggatgattggcccaaaactcggaactgccgatgtttcccgcgtggatctcgtaatccggtggggaggcagacggcgtttgtccggttttcttcctgtccagtcggtatattccgacttctatgttgtggatgattactggccggatttttcaccgcgccatgtggaggaagcgatttcctggtactccagacaagatgtgacgctgggcggttaaagctccagcgtcattcctgtctccaccagacggcagcgttcgccaaacattgtcttcattctgccgatggcctcaatgcctgtacagtggaccggcatgagaatatcaaatttacgtttttcaagctccccggcggtctctgtaatccgctgcgcagatgcgccggttaagtgcattccggcaaagacgctgtgcagcttttggccgggaaatgcctgtgacacgtattccagacaattcagaatccctgggtggcagcagccggcaaacaggcagagccctttccctgtttcaaagagaagcatctgttcatcgttcatgtagtccggccttttttccggtccgtcctcaatgaaaaactgttccggcctcttttccagacccggcgtatatgggatgtcgccaaggacccatactcccggggcaatctcctgctttctttcagtcagcctgatcgagctttcaatcagttcccttttccagggaatgcctatgatgcggtaagtccggcgatcgctgttgattgccgtcttacccaagaaggctgtctccctgacatagacgggaggcatatctatccctgccttccgatattcttccgccagaaatttgaggcccccgcaatggtcgaaatggccgtggctcaaaataatcccattaagccccatgagccgctcccccagcagtgccgcatttttcatgaatacgtccgtctgcccggtatcaaacagccagcgctttccttcgtgttcgatcaacagtgacagaccgtgttctgcgagaaagcctctttttcccgctgtattttcatttaaaaccgatatattcatgtttttcacctcattcgtaacagttcagacagcatgaacagttaccttaattcatcagactatcagccgcagcccgctttaggcggattctaatgttactattcacggcccaatgtcttttcgttaacagtgcaatagattggagatttaactgaggcccggaggacgcgtccggaacggaccatgtccggtgtggtgaggggggctgtctgagtcttccgtccccgtgggaggttggtcgtggagggggaatccggccggaatgaattgctgcggggaccgtttgcactctttggagtgcgcagcagtgctaagctcgtgagggacctcgctaagcaccggcggactcccatgtcccctccgcaattgattccgcctacttccccgggtcaggttttcaccggggacggaagactcaggcggaagttttcgcggcaccggacatggtccgttccgggcgctgattgcctccaaccttaaatgaggagggccctgtcgcagccactacgtgtttccggcaggccgatatcaaatcttccgcaattttaaaaaaagtacattgaaggcatatcgcatttctcgtgcacggaatcactaagtggccgcgacaaggtccgcccccgcacttaacgcgtgagactatcagcggccgcaggccagcggacggggccgatacacccggcggagtctttcgttccggcgaaaaccttccgggagaaggagatactgccgacatcttccggcggagaaggagagaatgatatccggaaggacgttcgcccgagagatgatagctcttaggcagagggagacaaagcgcgccgggcggattttagccctacaagggcaaaatccgggacaacttgagcttcgaactcattcggagttcggagcgaatttgtccgtaaccccggggggctttgccttcctctggcttagagctatccctcgaagaagcagtccagccggatatcattctctccggctccgccctgcgaaaacaaaaccacagtatctccttctccatccagcgatgccaaacccccgggacgaaagactcatatacacaccccaccaccccgtccgctggccgttccggcggcgtcctcacctgcttaactaaatctttaccgtttctgtgcattgcggagcgtgcaggttatcattgcgccgcgcactgccggaaaatccgttccgcctcttcatacatatagagagttcccagggcaatcagaggttttccctctctcatgctgtcctttaaggcacactccgccgcatcccgaagcgtatcaaatgcttcggctttccggacgccgtgctttctgaagcagtccgccagccgttctgccggaagcgctctggggttggccggtgtaacggtgtagaccgcattcgtatagggtttcagcagctcgatcatcgcatcatattccttatccgccataacacccataaaaatattaaccttctgtccgtcaaaatacgttcggatactgtctacggccactgtaattcctgccatattatgcgccccgtcatagattgtcagcggttcttttataattgtttcaaatcgggccggccatgatactgactgcatgcccgacctgactgcatcgccgctgatggccagtcccctttccttcaatacggaaataacagtcagtgcaacagccccgttggatggctggtacaggcccgggagggatagtctgatatctctgtactccttgaaatcaaaagtacatccccccagatccgtccgtacattttccaatgcgttataatctaccattgtcagctttgcttttcgggcttttgcctgttcttctataacctgccttgcattttcgctggctccgccaaatataacgggacagccctgtttaatcactccggctttttcaaaggctatcttttctatggtgtcgcccaaaaatcccatgtgatccagctccacatttacaattacggaagccagagtctctttcatcgtattggtagcgtcaagtctggcgcccataccggtctcacatattacaacatcgcatttcttttgatgaaagactttcatggctgccgcagagagaatctcaaattcagtcggcctgtcctccatcgcatccgccagagggcggataaaattaataatatcacaaaagctttcatcactgattggttgtttatccaggcggatacactcattcatctttctgatgtagggagaggtaaaaagtcccgtcttatatcccgccgctccgagaatggattccagcatcgtacagacggagcctttcccgttggttcccgtcacgtgaataatcttcagttcattctgaggatcgccaagaagggcaagcagcctgctcaccctctcaagtcccggcctgctgccgggagaaactccttcttttatatatgttactgcctcttcgtatttcatctgtctttcatcctttccagctgtctgccaaaagctttattgcgcagcagaaggtagatgatatatccttccgcacagccgatcacgatgtacagcggcactctcagcgccaccatctgcagcggatatccgaaatagatacgcaggccaatggatttgataatcatggaacctatcacatgggctgcgcccacggatgccgccagtctcagcttcggcttcgtacggaaacagttcttgtacaccagtccggaaataaagcccacggacgccgctcctgccgtaataatcggattaatcgcgtatccgacaagcaggcagccgataagatccgcgcaggcccccaccgtaagaccggcaagcggtccaaaaaagattccggccatcaataccgtcaggttttcgaaactgattcggaacggtcccgccgtaaatgacagctgcttgcccaaaacaatactgagcgcaataaacaaagccatcataatcaatacctggatgctcccaaaagaagatctcgttcctgttttcgctgtttgtctttctgcagacataaaaaatacctccttttaaccttgcccatatagcaagtaaagaaggctgtttcctcacagtctctgttccattgccgtatgaagcaggatgcagaatacgaaccgcaagcctgggcttttcgctcagccggcaactccccgtccggccaatacttaacgctcgtatccttactcttcagatgtcattattatatctctgattgcatgtacagtctattgaaaatatactgaatcggaaggttttttcttcattttgtaaagtattttgtatatattccgacaaaaaagtctccgtctgaactgttgccaggcgtgagacatttacagcaaaatttaccggcccccattgacggcggtaaaccagttaagtataataattagaatagataaaacaggaatcaaacttcaaataaattaaaagataaggagacgaatcattatggcaatctacatgaacgaaccatcccgtactttcggcgaatacctgctgattccgggatactcatccacgaaatgcattccggctaatgtcagcctgaaaactccgctggtaaagtacgcacagggagaggagccctctttaagtttaaatattcccatgacctccgctatcatgcagtccgtatccgacgacaacatggccattgcactggcaagagaaggaggtctttcctttatattcggttcgcagtccattgaaagccaggcccagatggtatcacgcgttaaaaattacagggcaggttttgtcatcagcgattccaatattacaccggaaaatactctggccgatattctggagctgaaagagaggacaggccattccaccgtagccgtcacttccgacggaacgtccatgggcaagcttctcggtattgttacaagcagggactacagggtcagcagaatgacgctcgatacaaaggtagccgattttatgaccagcttcgagcatttaatctgtgccgatgaaagcactacattaaaagaggccaatgatataatctgggagcataagctgaacagcctgccgattatcgacaaagagcagcgtcttgtctccatggtattccgcaaagattacaattctcacaaaaccaatgagaatgaactcattgattcctccaaacgctatatggtgggggccggaattaataccagggattacgcagagcggatccccgccctcttagaagcaggcgccgacgttctctgcattgacagctccgagggattttccgaatggcagaagattgttctcgactatgtcagggaaaattatggtgacaccgtgaaagtcggagcaggcaatgtcgtagacagcgaaggattccgtttccttgccgaagcaggcgccgactttgtgaaagtcggtatcggcggcggcgccatctgtattacaagagaacagaaaggtatcggccgcggacaggctacggccctgatagaggttgccaaggccagggatgagtattacagggaaacaggcgtttatgtgccgatttgttcggacggcggcattgtccatgactaccatatcacgctggcccttgcaatgggcgcggatttcctgatgctgggcagatattttgcaaggtttgatgaaagtccgactaagaaggtaaatataaacggaagctatatgaaggaatattggggtgagggcagcgcaagagccagaaactggcagagatatgatctcggcggcgatgcaaagctttctttcgaagagggagtggattcccttgtgccttatgccggtagcctgaaggataatgtgggcctttccttaagcaaggtacgttccactatgtgtaactgcggctgtctgaccataccggagcttcagaagaatgcaaaaatgacattaatatcctccacaagtattgtagagggcggcgcacatgatgtaatgctgaaagacagcagacagattatgtaagcttatacgataacctgcacgctcagcgcacaggtcactgtaattaatataaaagggccggtgccgcgcagaaagctttcattatctgcgcggcaccggccctttcagatatcggccggaatttctcttcagggcgtcaacgccgcttttgtgcgggggcggcttcccgcttatctcaccagacgttccacatccagaaggccccagccctgctggttatgaggcagccccaaatccaccgcccgctccctgagatgcagcttcacatccttattactcatccatggatatttttccagcaaaagtgcaatcgcccctgagaccagaggcgtagacatggatgtaccgctttttaccgtataaccgttctgtctgttggcacagcttataatactggagccgggagccacaatatcaggcttgcatacgcaggcgctggtgggcccccggccagagtaatctatcatgcggcttcccgccacatccacttccttataatcgtcggaacaacctaccgtaatgactttacggctgattccgggtgttgtgatggtatgctggcccggaccattgttgccggctgccactaccaccacaaagcctgcatcccaggcggcatcaactccccttaccagcgctgaatcttcgctcatcccctttttgctgaatgaacctacagatatgttgataattctgattccatattcctgtttgtgtctttcaacccatttaagccccgacagcacatcggaggcaaagccatttcctttctgatccagcacttttacgctgattaggctgcactccggtgcaacaccctgatatctcccatcggaagaaaggccttttcctccgattatcccggatatatgagtgccgtgtccgttgtcgtcataaggcagaaaccttctcttaagcatatcgttaaatacgacgattctattttcaaagtccctgtgaggaaatattcccgtatcgaggactgcaacacctacgccttttcctgtcaggcccagacggtatgccccgtcgcagtgaatccatttttttgcctgatccacaaaaacgccctgctttctgtattctttactttaggatattccgataggacggtttatggtatcaaaagaatgcagtaaaaattttcagcagaaggaaccttaaccggaacagggccagacagcggtctgatatcccgggaagaaaccagttcgtgcgctcctgcacggagcggtttatttaaccggataaatttcctgtttgacgataacctgcacactccgcacacaggtcaccgccttcaataaaaaacggctgcattgggacaggcggtttacattccctctgtcctcaattcagccattctcttttaacgctttatttcccttattccttatatatttttttactttggaaaactataataaactcccttattgctgagtccgcctctgaaccgggccagttcactgacggtcaccaattgatatcccgttcggtcagcgccggaatcagtgtcacggcagcatccccggaagccgtataaagctcatgcatcagaacaatatccccgtcctttacgctccccagcactttctgtaccgacgaggcggcatttctcgtcttccagtccagtgtgtctatgttccacatgatgatcggctggttaatattagccagaaccgtattgtttttattgcctcccggaagtctgaccagcgcgggagcttcgcctgtcaccgcggccacggtctggttacagcggtcaatctggctgcggatctgggctgcgttcagcttattcagatatttatgttcatatgtatggttgccaatttcatggccattgttatgcattctctttatctcagcctgataagacggtaccctgctgcctaccacaaagaaggtggccctgccgttatgctgctccaggctgtccataatcctgtttcccaccggcgcataaggaccatcgtcaaatgtcaacgccaccataggtttggtgggatcgatgtagcgtcctccgctggctatcattccttccgccggctgttctggctgtaccggctgctgctccggctgggttgtctgctccggctgctgctccggctgggttgtctgctccggctgctctggctgctgttccggctggcttgtctgctccggctgctgttccggctggcttgtctgctccggctgcgctggctgctgctccggcccggccccggccctttcgcctcttccctgctgttctccgcaatcgctgtatcggacgccggaccggaaggcccgtccgcataagctgcaggcgctgacgcaatcataaaagccgctgccagcaacatggctgcccatctttttcttgtcattctgttcaatttaatcatcttctctcctcagataaatctttactatattacatattattgtatcacaggcccacggtcaaaggaaccccggtttgcaggaaataaagtatttttcctgccattcgccggtaaaaatggcattatcatgaaaaacgtgattatctattaatatttttaataaataaagtctattgtccaatcccctaatatatgctatgatgaaaatgacgcttttattcttaaaataaatataaaatgaacttaccaaatatcgaaaggaagttaaaaatgggtggatttttcggtgttgcatctaagacaaactgtacgatggatctgtttttcggcgtagattaccattctcatctgggaacaagaagaggcggtatggccgtctatggtcctggcggctttaaccgttctattcataatatcgagaactctccgttccgtacaaaattcgaacgcgacgtggatgaacttcaaggcaatatgggcatcgcctgcatttccgacatggaaccccagcctcttctgattcagtcacatctggggagctatgccatcacgacggttggtaaaattgccaaccaggaagatctgattcgggaagcctatgaaaaaggccacattcattttctggaaatgagcggcggcaagatcaatgcgaccgagctggttgccgcgattatcaatcaggccgagtcgatcgtggacggccttctgctggcccaggagaaaatcataggctccatgaccatcctgcttcttactccggagggcatttacatttcccgtgacagaaaaggacgtaccccagccgtcatcggcagaaaagaaggggctttctgtgtctctttcgaaagttttgcttacattaatcttggctttactgattaccgtgaacttggcccgggcgagattgtcctgatgaaaccggaagggatagaaattttaagcccggcacgggaagagatgaaaatctgctccttcctttgggtttattatggatatccgacatcctcctatgaaggtattaatgtcgaggaaatgcgctataactgcggacgtatgctggcaaaacgcgatcatgcccaggccgatctggtggctggtatccccgattccggtattgcgcatgctatcggttatgccaacgaatccggcattccattttcacgccctttcattaagtacaccccaacctggccgcgttcctttatgccgaccagccagaaccagagaagtctgatcgcccggatgaaactgataccggtagactcactaatccgcggcaagagcctccttctcatcgacgactccattgtacgcggcacacagttgagcgaaacgacggaattcctgtatcagagcggcgcaaaggaagtgcatatccgccctgcatgcccgccgcttttattcggatgtaaatacctcaatttctcccgttccaattccgatctggatctgataacaagaagaattattcgggaccgtgaaggagataatgtatctgatgaaattctggccgactatgctaatccggacagccagaactacaaggatatggtggaagaaatcagaaaaagactcaatttcactacgcttcaattccacaggcttgacgatctggttgaatcaatcggaatttccccctgcaagctgtgtacctattgctggagcggaaaagagtaatcgaaataaacaggcgggggattactgaaacctaattgtagatttaactgaggtttggaggacgcgtccggaacggaccatgtccggtgtggtgagggggatggctgagtgttccgtccccgtgggaggttgtcgtggatggggaatccggccggaatgaattgctgcggggaccgtttgcactctttggagtgcgcatcagtgctaagctcgtgagggacctcgctaagcaccggcggagtctttcgtcccggcgaaaacctgaccttggggcggaggggaagataaagtctgcggatgccgttgaaattcatcgctgtttagcgaggtcctgtcgagcttagcagcgcgatgcatttcacagagcgggagtgtgctccgcagactttatcttcgcccgcagccccaaaccaccacaatcctcccccgggacgaaagactcatatacacaccccaccaccccgtccgctggccgtaccggcggcgtcctcacctgcttaactatcatatagattgacaaataccttcgcttccgctacaataagagtgaaaaataaaacgattcttttatttatcgggactcctgcccggatgttcccttcgtaaataagagccatgaatctttacaggatgcgtgggtcttttttattttcaggaattttggtggtgcaaacagcaacaattttcctgcggatagaaaagccacgcacagatgcatattgcaaatacctggaggattgatgctatgaatttttataagactttggatttgattatgagacaggatatcggaggacgcgggctgctcccctcactcccggcttcaccgctggctgaaacggccgcggcgctctccggtgcgaaaagagccgtcctgctgacgggatttccggtccgcctggctgatggaagctttatcggcgaaacggacggcccgtccggaacggcagccgcagccgcggctctgaacggaattggctgccataccgccgttgttacagattctgcttcttacccccttttaaaggaggctttgcgttggatggctccccagacctccctcgtgctgcttccaaaaaacgataccgctgcctttatccggaattttctcagtgatttcagaccgactcatttcatcagcctggaacgccccggaaaagcggcggacggccattaccacaatatgcgcggtgaaattatcgacgatatgatcgcggattcctcccccttcttatccgaagccaaaaagcttggcgcagtaaccatttccatcggagacgggggcaatgagatgggaatgggcgctttttacaggcaaattaccgcaaatgttccatgcggcgctgaaatttgtgcctgtgaatcggccgatattgcgttggccagcggtgtgtccaactggtggggatgggggctggctgctcttctatctgttgaaacggggcgttttcttcttccgtcggaagagaaagaaaccgagcttctgcgccgtgttgttgatgccggaggcgtggacggatgtaccagggaaagaacaatgaccgtagaccacctggctctggatgtccatctctccgttctgcgagccgttacagagctgacaaaaagaaccatgggggaaacgattcctgaaccgttcctctttatcaccggcaccggacatgcgggacgccgtctttcttcgccgccgtttccgccgcttctatcgtatgcattgccagaaccgaagcagtgactgagccgccaccgcccggaacagggtttacgttgattccgacgtcgaggaccgtctggccaggttttaccattttcccggtgacaaggcaagacttcagggtgcggtcagacagaccgcaccctgaagtcttgctatatctttaccagatcccgtactcctccgctttagcctgaagctcttcgcggaaatcaggatgtgcaacggcaatcagggccctggctctctgccccacattcagtccgcgcagccatgcaattccgtactcggtgacaacataatccgtatcattcctggaggtggtgacaacggctccctcatggaggaagggaacgattttggatcgaagcacctcattgccttcctcatccttcgccttataggtggagtgcatggcaataatggatttgccgcctttcgacatctgggctccctgtacggtctccgactggccgccggtaccggaccactggtcgtaaccgaccgtctcagacgcacactggcctgtaagatcaatctccagagtggcgttaaccgagacaaacttattgttccgcccaatggtatacggatcatttgtaaacgtacaggatttgaacagtacagccggattgttgtcaatgtaatcatagagccgctggcttcccatcgtaaaggagcagacagagtacccgtccagcaggcctttgcaggaattatctactgctccgcattcaatcagatctaccattgtttctgtaaacatttccgtatggattcccaggtgtttcttatttttcagctccgcggccactgcattcggaatatttccgataccgagctgaatcgtggaaccatcttccaccagggaggctacatattttccgattgcagcgtctacctccgtatacggggccagcctgctcaccggaatcgggcggtttgactctacaagggcgtcaacttccgatatatgtacctgggtatccccgaatgtcctggggaaattaggattcacctccaaaatcgtaagcgctccatagttgattaaatccctctcgtaaatagcgctgaccgacagggacatatagccatgctcatccatcggtgagacggttgccagcactaccggcctgcgcccctcatattccagacggctcagcgccttgcgcaaaactgaggtggagctttgtggcactgcactgaccagttttctcttatgggcatcgcgcagccccgggctgaaaaaccagccgttgtgtgacatgacgccctgcatttcaggatctttaaatgcttcataatattgtaacggcagacaggtgttaagagtcgtattcttcacccctgtacatttcaaatgcccgagatgagacagaatttctgccggttctccggctgcctgcgcggaaaacatatagtctccgtcttttatcagttccagtgcctcatcggctgtcatcaatttttcactgtatatttcttttaaatttttcattttcgactccttttctatataaaatattttctcactgagctgccatatccagccctgctaactgcatttaagttttgcatttactttttcggattttccgccttttcctgtctccggcagcaggaaggagcccaggaagaaagtcacgctcataatcaatgcgaagtttagtcccattccatatccgaagcggtctataataaagccaatgataaagtatgcggccgtttcaattatataggacaacgcccagaagaggcccattatcgtcgtaagctttgaaggagtcatccccggcagttcctgcggtatcatcatcagggaactgaccggcaggaacataaacatcccgataagaaacgccgccactgccgagagcaggctgctgtccgtccttaacatcagcaggccgaacagagtcatggcaaggccggaataacggattaccggaaggcgtttaaaatataccttacccaacgcgattgcaaggagggaaccgatgattccgccgatggcaacgagggtgccaagcgccttgctgctgattgccgtaactcccgatatagggaaaatattcagcataacgatataaaaagtcaacaatcccgaataggtaaaaggcagaatccagttgattttttctttcatggcctcctttatcgtatagggagcctgccctgttcccgtgctgcggttcaattcaaaatcctgtccgaacagcggccataacagccataaaagcgcgcttaccgctgcaaaaaatcccatactgtactgccaggttttaagccatataataaccggcccaactatcaccatagcaacaataccaccgaaattgtacgctgcgccgttcaatgcattgacggtaagtcgttttttagactcaaagtaatgaatgacgacgggactgaagtatactacgtacagcgctccgccgaatcccataataaatcttccgagaataaacagccagtactgggggcaaatattgcaagtgtgcttcccagtacaatcagcccggaaccaaggccgattgcctttttcgggtagagacggtttaagatgccggcggccataaagttgccgataatctttgccagcgtaatcgcattagagataaaggtcgccgacgcgaaggttttaaggttaaaatgctccataatctgtggtgtcaatgtactccccgcaatccagttaacggcaaaaaatgcatatgtaaaaaacattacaaactcaatcatgactgctctcgatgaagaaactttcatctcctgattccccataattcacaattcctttcttcttttcaaagacgattaaagcgctataatctgttttatctgctgcaccgcatggccactgcggctttgtggtttgattatagcatggctttttataaatgaaaaatagcctttcttcatgtgggatgaattgaattcatggaagccgggaacctttttaccgccttaaacgataaccggcacgctccgcgcacaagacaccgtcttcagcaaaaagcgcccgtccggcgtaaaaccggcgggcactttcttttcctaattattcttcctacttcctctttcctcttcctgctgcttttccagctattccgacagcgctgcatggtattcccgtgctttttccccggacatgctgacaatttccgtgatttgtccgttggaatctcttacgacggacagatttaccgttccgccttcgtcaaaccagaatgtttcaaaggagttgccggaaagcttatcgacaaataatttcactcgctgcccctgatactgtaatatatcgcggtcctgcagtctgcgttcctcccaccgggtttaagtcgtcggcgaagaaatcagaacggtattcctgtgccttattctctgtccgttataaagctgctgctccctatcctctgagattgcaacgccataagatgaatattgtgaatagatctggggatcgggcatgccccgcatactaatccctccgttccttcgcccattttaacaattcatcgatatcctcgtcggtcagtgctttatcatcatacaaggtattgataagattaaaaagtgagttgtcgtgatattgcttcataaagttgcctgtttcaaacttcaggtaatcttccctggccacaagcgggaaatattcgcgttccttcccttttttttcagatcgcaggaacccccgctctgccagccgcagcataagtgacacaattgtctgtatcttccactccttttctttccctatctgctccatgattacggccgtcgtcacgggcggttcgttggcccataccactttcattacttcaaattccgcatccggtaatttttttatcttatccataatttcaactccttaattccaatgcccttatgtttgtcatcttttttagacagttatcttacatttacactacatctgtcttaaatgaatatcaaggacatttgtgtaatcttttaatctttttattctgcctcatttgcagaatctgtccggcaggctccgataaccggtcactgtccaatgggccaagccctctccttctgtcaggagctgaagcacaaatccaaaaagcactgcatcggaaccgtaatgaatttatccttacggtaaataagagagagtgtccatggaaattccggttccttcagatgtatctgatgcacccgtgtattgttgaacttatccaccagaggtttggggagaatgcaaatcccctggttgtccgccaccatctcaaacagcagttcccactgatagctttcaaacgtaacattgggagaaaatcccgcctccccgcatttttccctgaccacatcatggaacatataatccggcgttacgagaagaaatttttcatccctgagcgcagaaaaagagacacacctttttgcggcaagcggatgctgcctcggaacgagtaaaaccgcttcggacgtatagattggccgtttaaaaaatttatcgtcgttaaaaggctcaatcaccacccccatatcaagcttccctgccgccaccatctcatgaagcgtcttggaagtaatctcttcaatctgcaaatcgataccgggatatttactgcggaattgatacaggattgagaagaaaaatatcgccccggccgtaggcgggattcccagcttcaaggttccgtccgcgctgtgcagccgctggaacaattcctgtgtctgggtatggtaaaaatcgagtatctttacagcatattcattaaatacattcccctggggtgtcagctggaattcctttgctccccggttaattaattccatctggaactcttcctccaaagcccggatcgccttacttaaagtagactggctgacaaaaagtttctccgccgccttcgtaaaactcccctgtctgacaatttccacataataattcaactgattcagtgtcattccccttatcccccttatcttcctgctctcataacgatcattctatcatatcggccccttttatgccaaccggaataattctgaagtagcaataagaagatcgcggtatttttctgtagaaatatcatggtgtacttggtataattctaaaatagaccggcaaaccggattatatgaatactggatacgaaacaaaaacgattgccaaaaggagccgtaaatcatgtatgataataacacactgctgatcgttggacaggctaaacccagccgcgaggatgccatctacaccctgcacgggaattttacataagtctggttgtagaaaaagaaagcggtaaaatcctggatattgagtgcaataccattcttgcagtcacaaggaattttgtagccgatctgttcattggaaagagcatcaaaacagatttggaggaactggaaaagacaattaaagagcggtattttgccctgacgcaaaaaccgttgattgcctgtatgaaagacgcccataaccgatatatgatggttaccgggaaatgaccccgccggaaccgccccatccccattaatattacgaataccagcaaaaaggccaggcacaaacggtgacctgcacgctccgcgcacaggtcaccgccatcaataaaaaagacgctgcgggatttatggataaaactccatgaatcccgcggcgtctttgtattatctacgtattaacttcgtattattttcgtattataccaatggcggtaaaaggcccgcccggcataccactgccgtttttctatttcatttttccggctgccttcacgacgactccgctgagggccagaagagcaaggatattcggaattaccataagtccgttgaaaaaatccgccagtgaccacacaagctccagcttcagggcggaaccgacgataatgcagattacaacaataaaggaataaactttggctgcattttcaccgaacaggtactttgcattgatcaggccgaagaaatgccagccaaggatcgtggagaatgcaaagaacagcagacagaccgctacaaacacgataccaaatgtaccaaagccctccatgaacgctgcctgtgtcagagccgtaccgtctttacctgagctcatcgcacctgtagtcagtacggaaaataccgtcaggttcaggataataaaggtatccacaaatacgctgatcatggcgcaaagtccctgctgatgaggtgactccgcttttgccctggcgtgtgcgtgaggggtggaacccataccggcctcattggagaaaagacctcttgccacaccaaaacggatggcttcctttactgcgataccagctcctgcgccaaggattgcctgaggatcaaaagcgccgacaaaaatcattttgaaagctgccggaatctgggtgaaattcattgcaatcagaatgacacttcccacaatgtagacacctgccataatcgggacaatcttttcaactaccgccgcaagcctctttgtgcctccaaggaaaatgaaggccgcaaatgcagctacaaccacgccgacagctaccggcggaatattcaggttaaatacatggaacacttcgacgaaggctgctccgatggagttggactgaaccatattccccatgaatccaagggccagaacgataaagactgcaaacaatgcggccagtaccttgccgaatgtacctttgaatgctgccttgatataatatacaggcccgcctgtcacttccccgttgacttcagttttataggtctgcgcaagcaccgcctctgcataaatagtcgccattccgaaaaatgcgctgatccacatccagaatatggcgccggggccgcctccgatcagggctgtcgccgcgcctgccaggttaccggtacccacctgggctgcaatcgctgttgcgatagactggaacgggctcatctcccccttctcatgcttctcaccattcagcttgatatggccgaatacctgcctgcatccttcaccgaattttctcacctggatgaatttcagcctgaccgtgtagtacactcccgtaccgcacagcaacagaatcaggagaaagctccagagaaaatcgttaccttttgataccacttccaataatgcgtccattttgttatcctcctctatgttttaattgcgctgccgttttgcggcaataaaataagagctgatagaaaccagctctccaaagagtagaacatttgcatacaacgggagcttctcccattgctttttatgtatgccctgtccttttgcctgagagatcgacagataccatggacttgaatctgtcttacaccttcggcgctcctaataaatggagactctccagagtaccctatcgcttctccagaaggaagcgtccgcctcctgaacagatgcagggcggaactgataggatatatatttgtgctttacatggtatcacagatctcttttatgttcaatctctttttttattttatttatacttttttaataattagttttataacctgttcttatgacgttattgttcacacaaggtcagttaggagatttagttaagcaggtgaggacgccgccgcaggccagcggacggggtggtgggattgttttatgagtctttcgtcccgggggaaaattgttgtggtttgggtctgcgggcgaagataaagcctgcggagcacgctcccgctctgtgaaatgcatcgcgctgctaagctcgtaagggacctcgctaatcagcgatggatttcaacggcatccgcagactttatcttcccctccgccccaaggccaggttttcgccgggacgaaagactccgccgggtgtatcggccccatccactggcctgcggccgctgatagtctcacgcgttaagtgcgggggcggaccttgtcgagaccactcagtgcttccgtgtgcggaaaatacgatatgcctttaatgcgcccttatgaaagaattgcggaaggtttgatttcagtttgccggaaacatgtagtggccgcgacagggcctccccatttaaggttagagacaatcagcgcccggaacggaccatgtccggtgtgagaaaaccttcgcctgagtcttccgtccccggcgataacctaaccttgggaagtaggcggaatcaattgcggaggggacatgggagtccgccggtgcttagcgaggtccctcacgagcttagcactgatgcgcactccaaagagtgcaaacggtccccgcagcaattcattccggccggattccccctccacgaccaccctctcacggggacggaagactcagccatccccctcaccacaccggacatggtccgttccggacgcgtcctccaaacctcagttaaatctccatattcctgtgaccactagccttatgactcgtctgggacctcctccccctcactgagcagtccggaggaatccagccagcaaagccgtccctctttcatagctgttctgtctgccgccatataaccgtctgcgtcaaaataataccagttttcatccagatacatccagttatcctgaggaaatgtcccatccttcagccagtatctccatccctcctcacaaagctcccagccgctttggttctcatccctgtctgcgtattccatacggttcttaccggccctgtcttcgtccagggacagccattccgattccaccggaatcccctttttatcattgatggaaaggggataaaccttataatgataaattccgcgttcccgcatcagcggtgaaaaatcataggtggttccctgggttttatggggatggcctatccgttttgaatttctgtaaagaagaaccatataggcatatgcattgtctgctttgtcccattctgccattgtttcccgaaaccgggcattcccgatttctccggttacatcgcagagtccttccgctttgacggacaggctcagcgtccctcttccgttctttctgactgccctgctgcacgacgccctgatgccggtcagcctgatatccgactgggtcataaccgcaaattcatttccctctagtgccgtcagttccacctcataaatatcctcctcatttttttcaatgccgctgacttcgtaagcctcactgtctgtctgaaactctgcctccggccttccgctttcatcgaagtcttcggccgtaagcctgagcctgaccttttttatctctgccgccatggcggggaaattccccgtcacggcaagcagacaggctgctattgcagaaaatatctttttacctgtcctttttctcattcttttttatcctccctgcttcttttgcttctccttgaccacagcataattgttccgcataaaaagagaactgccaaaatcagctccccggcccgtccgccgctgtctccggccggagccagcggagaaagccgtttcctcttaaggaatatattgcctgtccctttcagatttctgtcataatgaaccgtaattaaaccagccttttctgacaacgggtaattcggaatctgaatttcttttactgtgccctcgtttcctgttacggtaaattgatattcgtccggagaagggccgtatccctgtggtgcttttatttccaccgcaatataggttcccggcccgggcagttcaagccgcacacgtcctccgtctcctgtggatacattttttaagaaacggccgtccccgtgatagatggcaaattcggctccgggcaggcctttcatcgtgaccccgtcgtatttatggaggattacagtcaaatcactgtccttacctgttttatccggcggattttcaggcttctttctgtctttcatcctgaccgtaatcttctcttctccggcagaaaccgtaaatttcactggctccgccctctcatagccatatggcgcttcctcctctatagccgtgtaagtctctccctccttcaggatccccgtgacctcatgcgcagcgtcatcccggctgaggaaccggtatacttctcgtcctctcctatcctcaatccgtattaacgcgcctcccagaaagcccgtctccgtcgttccatccgcctccaggccaatcttttctattaaaacactggtgggaacgtccatcattacgacctgatccatgctgccgtcttctgacactgtgaaggtcaccggttccgccgttctgtacccggcaggcgcggtaatttcccgcagaatataggttttaccggcctccagtttccctttcagcacatgggcggttccatccgacacccacttttctatccggatgccgctttcatcggtaatttccagctctgctcctgacagcccttcttttgtctctgcgctgattttagagacatccaccctggtgggcctgtcactcactctgattaatgtatcggcgccgtcttcagaaaccgtaaaaaagagatcctctgcccttaaatatcccttcggcggacttatttcagtcaggcagtaggtctttcccggttccagtaaagccgatgtctcatgcagttgtccgtcggatatccactcatcaaggattgtcccgctctcattcttcaattgaaaatggacgccgggaagctcgtccacaccattcacctccgttttgccaaagagaacacggaccggctgatctttcatatccagcccgtctgccgaggcggattcatccagcagaaatgttgtctttcctgtgacaagctcttctccgtccgaataacaggttacctctgtcaaatggaaggcgtctcccttttttaacagctctctgacagagccatcattcattttatacaggaataccgcgcttgccgctttccgcccggttgttccttctgtgttaaattcggctctgccgtctggttccgcctccgtaatttcttccacatggtatcttgtattccatgggatgccggtgagcaccacgtgttcaccgcctcccaacgtgagaactccgccgcttttgaataccccctctctgtcgccggtataaggaaagctgccttttaactgcatacctgtctcatcacacaactccagcctgtactgccattcccggcctttaagctgcccggccgcagttcccgacagacagctcaccacagaaaggcttccttcccccgcaaccgggttttcctgtaagaatgcggcattgtctatctgtgccctgcaaacgattttctcttttgcctcctttttcaccgctgcggtcagaatgatttttctttcttctccgggaagaactccctttaatgtcatcccgacggcgctttgctcatcttccctccactccggttcagaattagcgggcataaactcagtctggggatccaaatatgccgtaactttgatgtcccttttctctttcttcgtatttttgcaggtaatttcgtatttaataaccgtatccggcatgactgccgctccatattttccgttatcacccacggttttgatattgttcttttcttcgtattcagggttgcagatgatgtgccggtacccgaatccctctctgttttcaacctcccattcctcaagcagccctccgcttgatgtctcagcctttaggaccgtcttttctgccgtcctaagacttggcctgtattccccggctgcatccagattcattctgaataccagacgccgggtgattctggaattctgatcggtaaagaaagtaatttctttttcctcatacagggcatcctgctcaatgccgtcgtctgccgtcaggggcgcagtctgataagaggggaccactatcgttttctctgtcccaatccgggtaagccagacctctgtcttcaccgcttttcttccctgaatggatacttcctccaccgcatcctgaaaaagctcggccgtcttaaggtttaccgaacgctcctgttcatggatactgctgattttcctgccgtcgtccgagagaacaaacagaacaggctccgccttcagatacccggcagggcttttaagctctttcaggaagtaaacgcctccggccgtcaattttcctctgactctgtgtctcgtcccgtcggaaacccactcttcgcatggttcgccaaacggaatgtattttccgtcctcttcggccgcctggtaaatagccagcctcgctcctgcaacaaattcgccggtataaaaatccgacttggatatgccgatgtcagtcggctcatttttcacctgccaattgaaagcgagtgtctccccgtcttccttgccgtcgaaatagaaggtttgtatcgtcggtgacagggcatatttctccggagcagccagctcccttatggtgtatttatccggaatccattttccgtctcttacttcccctgtcctcagcccggtcagttctgcgcatcctttttcgtcggttacaatggaataaatctctcccgtattacagtttttcacttcaaactttgctcccggaagttcttttccactgtccgatgcctctttctctatccttattttccctttcttcaggcggttcctggcggtaacgcgcaggattccattctccgtcctgtctccggggatttctattctctgcggttccatccgtgcaaagccttccggcgctctatgctctgctaaatagtaaatcccctccgtaaggaaaccaatccggcgcggcttcatctccccggccagaaacccatccggtatcgttccatcgtagtaatccttcatcgtatagaagccctcttcccccgaaatccaggtatcttccaggtattggttttcctttatgaaattcccgctgctgtccgaacggtacagggccagttctgctcccgccagactttttccgtcttcagaaaccttatcaatataaagatagagtggcttgttctttacggagtatagctggatgtccgctgtctcttccacgtcaaggattctgtcctccgccttctcaaagccgtccggagccttcagttccgccaacctgtagcggccgcgcggtatatagtcgaaccggtggtttcccgaaggggtgtcatagctcaccgcattgggaaaatgtccggattccagctttttatagttaaacttataatcataaacatatcctcccgttccctccggtgtcatgttcttccctgcgcatatcaaaatctgttttcctgtatctgtctcccatatctgccgcactgattcgttcttctgcgtattctcggaggatatacgctttgccgatctctgtgccagccatccaaccgtcagggcattctcatcatttgaatagcttctgataaagccctccctgtcccgcggttccattccctcctggaaaatcagagtgtcctcctccaaaatgatcttaaaaccgtccgatgtccggaacactctgtccgaagcggaagctctcactgccagacgctccgtctcccacgacaggctgtcaaatccggttccatatcggctgaacatttcctcataattataggtaaaaccgctgggcgacaattgcctgcccgggttaaagaattttctgattgtatcggaaatccccgtcttcctgtatcctgatgtgtcgacaaccgaagtatattcgcggcagtcatcggttgtccactcgtctgccagattattttccgcatcgtaaagggcaaattctgcgggattgctgttggcaaccggaagtctgccgccgtccgtctctaagtacttgtaaatttccaatttcgtatgatcgttcggaagtacaaagtgttgcagcccctcattctcccggatctcaattcccatcgacgaagcgacataaccggacggggtatccgtctcctccagtatatataagcctttcgggatggcctccagatataggggcgccgcgcctgtcacccattgggctgtaaacgtctgttcccggttctgttcatcgagtgccgtccagcttgcaggcgtttcttccgccttttccagacggtacccggaaaactgattgccaatgccttcaggcccgttccgtctggcacggtacagggccagtccggcccctgccacgccgccgtatgaaaaaccggcttttccttctgtcctgaactgcgtttcttccaggacctgatccttgtcaatgaccctgacacggaaagactccggggcatccagcttttcaaagtatccgctgacaggccggtcggtcatcttcaccttctggatttcagaaccgtcctcaaccgccagtcctttaggcattgcctttacatagcctttgggagctttcaattcctccagaatgtagagccccgccggtacgcgtttgagtacatccacctgtccgtctgtcatatcacttcggaacggatcgtccggggccgcttcccctgttgtccaggtattgggaataatataactctctccctggcggcggttcagcggccggtcgtcccccgcctgttccggttctgcgccgatatccagtaaatcccggtttgtttcaatcctccaggcattgtcattgtaggctttcaatttatcgtcataccggtaccggacataatccccgtcgcggtcatagacgggactgccctttgagtacagctcttccgacttctgatagtaatcgggctgtccgtgaccattcaacactggattcatctctttacggaacgcgccgtccttataggttccgattgtaaactcgtcttttgtatcggcgtttatcgtggcaatacggctggtcgtaatcttttctctggcaatgacatggccgtattcatcttttgaaatcctgaccggccacaccataatcctcccgtcatccgcctccacatatgccatccctgtgtacggcgcagtccggctgtcccggttcttgtctgcatccaggtgaaacatttctgtccccgccggaaccttttcaaaaacgtgatccttttcgttatattttagttcctcataattggggcagataatctctaaaaacggtgttccgttttttaatccatagattggttcgccatttttagcctgtatcttccgcgcatttttgtcataaccgtactgaatgcctttttcctccgtcaacacctccaggccgcccagatcatagtaaagaatatccgtattttcccgttctacggttttatagctccaggtgccctctcccttgtcatcctcctgatcgttataggtgtaatgctcaaaatccgtgagtccgtcactgcccggctctgtcttatcaagcacgaatttaatctgtgtcccggcgaaccctttttgcacatacatattcatcacatttccataccgatcccgctctacattcacaccgtcaaactggaaatcttcactgtctccgtttactttcacctcaatggcatcatagagcgtcatcaccgcacccggaagatatcggttcatgtcaccggccgtattcaactgcttttccagccatgctttcccggtgaaaacgccatcttcatataaaatctcaattttctcaccggcggcctgttttgccttcagcgcatccagaaaccccttcttccagccataacccagatacgccccggaactgttgcaggccaattccaggttctccaaaccataccggcccttcagctccgtaatactgccctccaggcggccgttcaattcatatttcacctgatcctcatccggtttcgctttcgtcatttccaggcggatcggagtattgttcagatacagcctcgccacatctccggtatcgagtgttccggtaactgcttcctcataaagcgccgctgccacccggttatcccgttccccgtctaagtaataattaacttcgtcggagtaaatttcaattgcagccggcttgctccggacgtaaccggccggcgctttaatctcacaaagcacatagcagccggctcctaaaggctgcggtgtctccagatatcctacattttggctgccgtttgcttttcctctgtctttcgtggtggtataagccttaaattgccctgtcttttcacctgacgcatcggtcataataatcatctccgattccttacagactggcgtgccggcggggacggtcccataatattttccgttatagggaacctgccagggaagcgaaggtctggcaaaaggtgtgatattattcgctcccatcgcctccaaaaattctttactcccggaaattaccgtatcctgttcatagaatttcacccggccgttgctgtttccggcatcttcacggtctgcactgtaaagggcaaatattgcactgtcatgcagaatattttcccctgtctcgaaatccagtttttctatcctgagccgggaagtatagaacgtattgcggtattttccatctgcgtaaccggaaaatgcggccgcactgtactcttcggcatctgccggctctgtcactgaccatggaaccagcgcagcaaaataaaggccgtcatatccggttcgtacgccggtgatggtttttactccatccttgaaataaaaaccggacggattgttgtcatcatcggccggaccatgcagaaagaatacatcatcggctgttccagcctgttcagaaagcgatgcgtagtgataatatttttctactatctgattgctccggtaatcactggctgtgttctcacattcgtaaacatccttgtatggatcgaatgcttcctgagtgactgtaaatccctgataactgtaatcgccgcccggataggctatttttcccgtcagcttatctgcagccagcccatatttatatacttcaaaatctccgtcacgattgtgtgcccgtatcacatagtctctcaaatcgcctgtatgcgcagccgaccactcttcgttcatcctgattaggtatttcttttgtaaattttccggcgtatccgtaccggtgtattgatatatatcacaaaatttttccggtgataccaaattgccgccgtcttcatagagagccggaagaacgatttccttcggtttatctgtcttataatgtttattgtaaaagtctcccagtccggcgctgtacggctgctgctccaccgcaatatacgccccatatggcagatatttcgacacaccatagaaatatccgtccttcgatgtttcaaggccgtttccggctgtttcccggagtgtatcggccgccagggtggtccgatctttgtcgcttcccccatccgtctcgctgtcccaggcaatcgaatagatttcgtccaaatcataagtgaaaaacggcttcaggtaattttctgctttcaaaatggcctgcagcagcgccttatcataaatttcctcctgataggtttcaccggctccggccgcctggctctctccgcctccgttatcctccgttatctttttcacttcaccatccagataccatgtaatggcgaactggcgtaccgcatcagagcgctttgcattctccctggccgcttcagatgtattcacccggttctccgtctctgaattattgtgaactgccgggtatgctttttccccgccggctgtcccgaatattaattcccggatgaaggcaaatggcttatgggaggtgcttgcgttatccttcctgtcccatttatcatgattggcagtctggagagcatcaaaaaacttatcataattgtaattttccacctctctcgtttgaccgtccccatcctccattgtcctggttgtcgtttcaagcagtctggtataacccgggttctgattttccccgatcattttgttctcctcataaggatacaggctttcattcacggtgacggcttctttccatacattgttattgatagaacccgcggtcagggaattttccttgtgcggcactttcgtgtagaatttttgcacaccggcatacggttcttttaccggataagcttttcggtaatttgttatatctgcctcgtttccattccgatcgagccacactattcctccagcttcatcccggtacagtctttccagatttgattttagatatagtttaaaacggaaattcggaagttttgatgcgttttccgcccttcctcccggcccgtctgtgaaacggtcctgatggcctgcatcggcattggtattatgcgcataagttccttccggcgttgtctgaatatctttcacaattttaatcttctggcggattgcccgttcaaatacctgggccggctgctcccttgttccgccatcctgataaagcttttcttgtccgggatatgccagacttgtaagaagcacgtaggtgttatctcccaccaggttcatattttgataatccaggtatgcttttgctctggcttgctttacatgcacatagtagcttgcgctgttcatcggacgtccggcaacaaaaccggctcctaaaacggaaacgtctgccgctgataaaattacctctttttccttcagaacagccttgaattctattgtctggtcatgaccggcgttcgtatgtgcagtcccgtaggaatcggtataagctgcatttaccggaaggacatacgttccatccgccatccgctctgccggtaccttttgccacttaacatcttgtacctcctgcagctttgtgcttgtgacttcccggtactcaaacgcccggatcaatgctccgctgctgtcccgcactaattccccgctctgataatagacattttcttttactgtttttgattgtaggttcccgtctcgatccgcaacggcatcggttatcagagtggcgcttccaagggccgcagagccgccggccccctcccggtaatcttcatacgtaccaaacgctgcgtaatccggattattggaatatgccgcataaatgtatctcggcggcagtgaactgtcacccggaatatggggcactgcatgataaataatactgtccgccaccggatcatttcctaaaaccataaagttttccggctttccgacgacaccggcatacacggtgaatatgtaatcaaagccagacgcctcaactgcatcgattcctccatagctgtaaaacggattgttgtcgtaatagttcaggattgaaagtatggcatcacccacggtaagggcggttccatccggcctttggcctgcaatggcgacccgccgcacaggggaaccgtaaaccgtatatgcagcctggctccccggagtcactccagacaatccgtaccgatcctcctctccttgccgcaccccggtatcaaactcaccggtatcgatcgtggaataacgatagcctccgcccggcaggggtcttcccggcgttgacttcccgttttttctcagtgccttttccactttccctttcacaaataaaagatttccggaagtaaatgtttcaactagcatcgactgattttcgtcttccgtcattcccccatcggccttatttagaacggcctgtataagagctttgtccagtggccggaccgtaacctgccggaaccgttcggccacataatttattggcacctctttcatcattggacttccatccggattatatttcaaatattggtgttcgttttctgcgcggatataccggggacttccatccggattggtcaacaggactttttcatacgttccggttcccacctgtacctcaatctgtctggttccttcctctctgcgatagaactcagcgcctttcggaaggccggacaggacaatatcatatttctgctccttcgtatcttttgaacgggccgcaaagtacaagtcattcggcctggctccggttccatcatcggatgtctgctcatcggcaaacagctgctgtgtaacaactgcatgccctttcgattcttccggggcctttacctctaaatcctgtccgaaatttgttatatcattggcccggtttccgattgacagctcatatccttcggaacgggacagctctttgacataatagtcccccatcagaaggggccggccgatccagcaatttccattatccgcttcattgtctgtatattgtctccggtactggccgtcctctgaataatcatcataaaagcgctccgaccggtagagattctttggcgctttctccctccacccgtcgccggtgtcaacgacagctcccatttgataatcataggcccggcccggcgcttccgtgatggcaagaaaagaggcatctccgtttttatccgttgctgcgatcgcaaccaggttgtttgcccggtaaaccactcccgtctttccgtccggatgggaaatatcttccgctgcaaacaaaccgtagaccgctccttccagcgttccgtccccctgagcatccccatatgcgctgtaattagctgattcaccggaagccaaatcaatatcctttttgttaatatgaaattccccttctgtccggtgatcgtaaatcctccaggcatttccttcccgatctgcattattgcagtgactgtaattaccatccggcccataatccgcgccggctccactgctctctgcggccagtgcctcctcataagccggccaaaacagctcccgcctcattgtctccatttccctgacgttgggatttctgaatgaagatgccgcatggaaccattgaaatgctgcttctgacggggtggctgcctccgatggtgcagcagcctgtgatggtgtagctgcctgtgatggtgtagctgcctgtgatggtgtagctgcctgtgatggtgtagctgcctgtatatcatttttctcatcttcatcaataaactgaaatacgggggtagacggtgcagattttctgttggaagtttttttctcctgctcttctgctgactcaatttcgttttcatctgttatagcttcaggcgtaagatacgtcacaatgtcctggacagtcgttgcagcttcctgaaaaagctgcttcgccacattcttacgaatcggttcgacctctttcttttcttccgttttctctgttacagcagttcgattagaatagccggctgctccgctttccagcgtttcttttttactgtacccgccggcaaaaaatgcatttgcaccggcctccgatgaatcggttgtaataatttccaccgggagatcgtcaacatgaagatcgtgccggatataaccatcccttgcctgaaactccgtataggcgtaactgtatttcaaggatataaacttctcatatgtttcttgcatgtcctgatagcagcctgattcttcatatgctgtgtcggaatccggctctgttgtatttccaccgtccggagtgctgccctcgtctccgcctgaacttgcaatgtttgtaatttccccctggtctacatcggacatcagccaatggaaatgtactccctcaaaattcccggaggcctgttcttcacagtctgacacacagtcaagccatgcctgggctaattcccggttcactgttttggctgcttcaatttcctcggcgtttaaaatcccgccgccctcgtcgtcatcctccgcaaaagccgttaattcctcctcttcctcgatttctggttcgggtaccggaacaaaggtgggagccggatgaccatcacagaatgtcttgtcatagtgatagccgtgggttattgtctgtgctgcatgtccgtttgcatctgtcaccacagaaccaacattccgaaagccggaccaaatgacagggttatccttgtgatagctggcgtacggttctcctccttcgtaaatatgtaccgggccatctttttcggtgtcaatttctcctttatcatcaaaccgctcaaataggacaaatctcgcattttccagcggctggccggtttcataatcatatttataaagctgtgtgttatacgtggatttaaactcttcctcatggcgaaaaacctggaaagtgattcctcctccagccgcactaacagccggttcgccggcaagggcagcgtaaaacactattggtacagtatcaatttccagccaaaccattcgttgatgttgccaaggtggagtggatggaggagttcccccaccatgtcttcccgaacaggtaatacattcccatatttgtagacactcatcaaatagagcttcttctgatacataagcaccgcccgtgctggcatactccgttccttctacttcaaatttaattaatgctttgggaggttgagggtttggatttgaaaaggtaatgctgtttgatgtctttgtatagctccatccatctgtcggctctggtttatatgttgcaccattgtcatttgagaatacaattggaaccttttgaataaaatctgcatcagctccacccgcatcaaagtgtatagtaaaatcagaacggttgatttgataggcggttgtaagagaggtgctgtcggcaattatatcaggaacttttttcccgctttgagtggaaccaccactgccaccaaggagtcctcccatcttcaaatactcctcggtatgagcagcaacatattccagccatgaatacttatctcggacgctaaagctataaatcaacgcctttaaatcttcctctgttacatactttcttatttgaatttttccttgcgctggagcattagaattaattatgttaatgatactatttgctttcttaacccctaatgatgcttgaagagttagaattccccaaaatatgtactcttgttcttttttcgacaaaggtacttctgcttctgacggcctatgcttcttgtatacatctccatcatcagcaattccccaaatggcaagccctcctttgtcgatacaataaagcttatgagtgccaccaaaatcgccatgcgcggtggttaatgttactgtatccttttctgcggcctgcacctgtaatgacgacaggtagggaaaaaatgtcataaggcacaacatgactgacaaaaacaatgacgttgctctctttcctctctctttccacatactaacttttttcatcttttttcttctcctaattacctcaaacaaaaaatgccttcaacccacgttcttttcagagcgccggttgaaggcattaaaaattattctataataaaacttattcttgaatcataacatcaattgagttataatatacatacaaaaggaataaccgcccacaaagtggttggccagatatttgagtagaaaatccaccctaactcgccaaagtttagagggtggtttttctatggtttaaagcatttatctagcgaacgtaaaaacgaacgttagcaatgccaagatgaaaagtccaaatgtcatcaaatccttgaagtcaaatttcatctgcatcacctatgtaagatgaaggccaaccaccctgtaacacggttattccctttaataatttatcatatgtcttgacatttttctacagccattttaccacattgactttaaaatctcacacatttgcttttcatattcttcatatgatatttccttagctgatagttttctatccagttctgcttccataggattaattcttgcccaatcagcttcagtaattaaaccggctgttgttttttgatccactggatatgttttcccgttagatagaaaaggatctgtaccggtcgggtcggttgcaaaccattgaccattaatttttaataaacaagcctgatgtaaatatgaaggtgtgtatacttcacattctaagcctacgaatttagctaagtattggaactcttcagagaaatctccgcatacaccctttctgctgatatgattgttgtggtaaacattgaaacaatttttttgtatttgttatttatcatattattttttccttgtcatttataatcaacacgcttttttgttgactgaaagcaaaaagacgcttaaacgtcccattgcatattaataaggcgaattatgctaaatgaccttaaaatttaattattaatttctgaaattcagagtcttgttagaaaatccccccatctttcatatccgtcttcttcacaaagtccaggtgatataatttttcccaatggttaatattcaaggtcccctttgtaagataaattgctaaaatacagcaattttcatcattttcgttgttcgccatatcataccagtccgcaaaagctgaacgaagtttttttcttatttcagtgttttggggctcaagtacccaaccaaggtttttacctactccgatagcagtaaacatctccgaggagagagcaactgaaacctccgcattttgctctatttgtaacattttgtttgattttccatatgtaacaacataaaaggtgcagtcttcgtaatatgcatccacacaacggacaaccggacgaggatttccgtcagcactcgattctcgggcgatggtcatttcctccttcgtacatttccgaaggagcatcggaatctatcctctgtcttctttgcttttacacacggttattttatcatgctttatcatctatgacaatcaattatgttttcctttttactttatctgcctttcatttaacgctctggttcatcttaaattttccttatcgtttcctccatagtttttaggggcggccgccgtgccattagccgcccatcatttgttgctatcattcaaccgtgtaatctctattcagttgtcaatgtgcatcgattttgctgcgttgataaatgggaaagtgggagttacacccacactgctctgcagcttctctattttgagaattttccctgattcttatttataccgaaataccaggaactctgacttgaatcactccttccaccgtccattcccccttatcattcacctggttcccatccggtaacgtcgtgttcttcaagagcgcacctctcgttccatccggctccggattaaaatagtatctgcgttccagaccgtctgctccggcaatccactgccagcctgtcaccatatgtccctgtgttccatcggacttcggccacagataatacagatttccgtctgtatccggataccagccgctcaccatatgtccggtttcatcaaagcggaaccaatctgtgctgctctgttctctgcctgcatatggattatggacataggcccattcgttgtgatacgttcttccgtgtgctgtaaacgcccataaaccgtctgccgtattaacccaggttccgacaacgctgccggccggagccgaggtgcctgcagccgggccatttccggcagggccgatgtctccgcccgggcttacgcctgaggaggagccgcttccaccgccggaggagccgcctttgccgccggagcctccatatgtcagatcagacagtttatatcggattgtggcattgcagattgccttgaagcctccatcctctgttgtagctgtaataatcgcagtgtgaacggctgtgtaaggatatgtcttatccgtatcctgaatccattttgcgtttctgttaaccgtcaccgttccgtcgccgtccagcttcagggaatcgtcgctgacctcaaaacggcatgccttattaaaggccatttccggaagcacaactgcttttatctttttttccccgtcacctgtccatgaaattaccgggctgcttcttttaccgcttttcgtacattccagttcgaaattcatggtttgcggctctgtaattactccctccgcataaacctccgtctgatcctccgtcacaaaattgatcacaatattgcaattcgctgtctgacggtttcccagcatatcgtccgctgtaaccgttaccttcgcctccctgctgccggagcctccaaggactgcataaggctcattcgtccggatgccgtcatctgtctctatgatatcctgaatccattttgcatctttcctgacactgacaccggcggaccggttctctccatccacggtagcaacggcaggatcgtccactgaccaggtgatgtctttcctgtcaaaaaagtccggggaaaatgaggcagtcaagttttgaggcggtgttaccagtatcctttcttcgggcttcttccggccgcccgttagtcttcttgtcaccgtaaaccggagttcctcttgatcaatgaccgccccctcatttgccacataagttttatcttttatctgaaaggtgacattaatccggcagttaccggtacagggttttccttcaaagctggcggccggtctggttgatgccgtcagaacggccacgcctccgttctgatgcccggctccgaaaatggtgtcaggaatcgggtaccggtaagcattgtccgcctgctctttttccagtttccggattgtatcatcaaagaaggacgcattcagattgacacagacagaagcactttttttcgtgaacccttccctgtcttcatcgtcatttgccgcaagtataatcaggtccggatcatccacggaccatttgacagaattgtccgccacatcattgtttgtatcaacaacagcctgaatgaagacaggctgaatttgtgttccctgctgaagcgctccgttgatgtaggaggcaatcagctttccgttgtgatccagaacctttgtcgtcttcacaggatttttcctattgcctgtgcgttcctgtataacgctgatattaaaatttgaaggaacaaccgatacccttgccgcaacttttttatacacggctttcacctccgtgttttcctccggcatggtgaaggtgtattcgccgccgtttctataagttgtctctttctcccctcctactgccgtataggtcggaaccccgtccatctgaaatttagcttcttccgtattattcggtgatgtcgttaccgtgacactctttcccggcgcaacagcccccctttttcccttattaaccgcacggtaataacttccgtctccgcgcgcctccagcatcgccacatcgtaataataggttcctgatgatattgtatctatctggggaatcgtaattaaataccctctggtcgggcggcctgcatcgttgggggcaaaatggtcgattgaatacccggcttcatctgcaccggcaccgccgtgatcttcatcaataatcgataaaattcctttttccagaacctcataatagtactgatccgatatatttttcgatactccgccctgtacgagggtatagaaaggatcgcccggatgggaatacccaatatttgcagaatacgtatattcattgtcatccggaattccgcttccacatatgttaaaagcaattttgctctccatgtcggcaaacaaaaatccaacatccgcgccatagcggaaataatcccccgcctccctatgtcctataaaggttcccctgtgcccggccgctccggttcccgactggccgattattccctcaaagcgtgccaccttcattcgtcctgacgcatactttcccgtaattcctccgacaataccggagccgcttccgccaatcgtaccggatacatagctgttataaatatcagaggcattctggaatccggcaattcctccaaccgttgcattacggccctgtatccgggaggtactgttatcccccgtctcaacccggcagtccacaatactgctgccagccgccttcccggcaatcccgccgacatatgtatcgattcctccgttgacatcgattgttacgttggatatgcagttttcgattaccgacagggacggatcgctcccctcaattacagccgtaattccgccggatgttccggatgccgatacgctgccggatacggtacagcctgtgatttttgaatttactgcgctgccggccagaatggcaacctctttttggccgcatactgtttttccgggcttcagggtcagattttcaaccgcagcatcttcaattgccccaaagaacccaaccttgttccaggaagttcggtttagtctgaaattggaaatagttttgccgtttccatcaaaactgccgaaaaatttatttgtaatctcgccggaaaactcagaggaatccctgaaatatccaatcggattccactccattcctcccaaatcaatattgctcatcaacctgaaatgcttaccgtcataagagccgataatttcttcgtttccctcccccggctgtacccgcattcccattgcggcaagctgggcaaggcccattagctgatttttatttttaatctgatacggttttttttccgaaccgtccccggctgttccgtctaaaaatgaaaaatccccgttccagttatcccagatatctcccagcgaactttttcccaccgccgacagcgccatggaacttgttgcagggatctcacttccggatgccgctgctagcctttccggctctgcctctcccggagttgtcatgcggttctccttgcgccttccatcaaattcccggctgtacacggtatcccagtcctcaaaggtaaacccctttgtcgctgccaacccatggagagaaccggttaaaagcatgatggttatcaggactgccgatgtcagccctttcccctgcctgagtatgccctgatttcttttcttcatcgtatcctcctcgctttcattctcaaaagagctttttttaagagccgcccttgttgtcttccttgatttctcgtccccgctgtctctatatattacggttctgcgaatagaaacacggtactccctattctgcctgcggcaccgcaaaggcgggacggagtccgtatgtctggctccctgccggtaccggatgaatatttccgttgactaaatcgacggcgtatacatgatcggagtaataaaatctcccttcatgatcctctgcgtaatagggcgtccgaagataatatccctgtgaataggggcttatctgaactgccggattattctgctgtgaaccgaaccgccacagttccttcctgtaccggagcgcttcctccacagaaaggcagaacaaacgatcctgcatcaactgaaaaccgatatcatgcggcgccagcaggctgccgtccagctgctccatggttcctgccgccgtcccccctgtataggccgtattaattccaatcaaaaccggttctaaattaaagctgctgttcacgctgttttgcgccagccattcccgtatccgggaggacttataattattatcaggcccgaaagaaatctcttttaatgccatgctgctgcaggtatcggcacggatcacactgtcacagagaaacagggcggcgcttcggcggccatccagattatcactgtaatcttcatccacacagcggaaacggtacagcttctgccctatctgccgcatctggatatcccccgttttccagtttgacggctcagctttctcccctgtctccggacttttcaacaatatgaacgggcggacaccatacgccctgctttccgctgccggaacaaggcacagacctccctccggatccacggcgtaaacagcgcctcctgacacggtccgaagaaggcaggcattccctgcttctatcatttctgcatacgcttcatactcatccgttgaaagcagtgccgcataatcgttccttccgtctgcgtccggccgctcaatcggctggagggcagacgcggcagaaatgttgttggcaaatgcgagattaaaatattcccggagaggcgaaccgttatagtcagactccgtaaaacaaatgcccgtgatatcctctcccagcgtttcctccgacagatagagtatgtttccggaccctctgtaattcaaatcaagacagcggaagacaagctctttttccccactctccgtttggaggacagttctgattctgtctccaatctgtgcggggaacgcccgttttttgcagcggtcacagagagaatctccgtccgaatcataatggcctgatgcggggaggattactgtctcctccattctgcatttcttacagcagtaggtctcctgtccatttttcagacagtcattctcccctgcaatgataagctcccagttatgggtacagttttccgcattccagttacggcgaacggaaatccggagtacggtgcagctatccttcccaaccttaaatctgtcttccatgacggcagaatactctgcatcaaagcttgtgccgattaccagcgtctgcggcacgtaattttttccaatcatataaaaactgtgccaccgggcatcctgaatcatggaaacaagatttttaatccgttcgttattgcgtgattcattctctaccatcaaatgaacgccgctgccttcctcctctccctgtcccgtaataaggcagtctgccttccacgcccgctcgagccaccgggcgagcctttcccggccttcccgatccggatcttccggcgccgctatcttctcaccctgccggtattcgacgtagtacttatggcggcctgcctgatagaggagaaattcctggggactgtctgcctccgccctccagatatgtccgtcggccccaataatctgcttcggaaaagaaacatggattgcagttccttccggagcctgcccctgctgcgaattaaaaatcctgttatcatggtctgcggcatctacaaaagataccgtatattcaataaatccctccttttcttctttgccataggaagggaagccgtggcagattatcagcacggcggcgacaagtaaaagtcctgtattaaaacgcttcacgacttccctcctttgacttccctaatcttccttttttccatttcattgttttaggttttgtcataatttcctcctgtttttattttttggcaaacaaaatcacactggtatgatacggcatgattaatatttgtaacagttcatgcagtctgaactgttactaatgttttgaaactctgcggattcgggtttagatgtagcggatttagatactaagcatgactaacaaacagaaattcagaatatgaaaaaaaatagtacaaattaagcacaaaagcaaaaagattataataaattgcaaaatggaatatagtgtgaaagaaagtagaggacagcccaaaagtggcatacttatctaagctgtcagcaagtggcaactttttataagtgtttattaaaacaacaattaagaagctattggttctggtggaggatataatccctcgcgttgcaatagtttcatggcttgcttgatggcttttgctttttgtttttccagtaaagcttcaagtgtatcgattttatacaaatcgcttggattccatgattcaccagttgataacatctggtaaattgcagtaagaatcattcgggcgattgcaacaatggctcttttcttgccacggcgtttcatcagagattcatatttcttcttgtagtaaggagatttctcggatttgacggctgcatgagcacactgcactaatgcaggtttgaggtagacaccggcacgtgtaacccgaacggatttcttcttgccaccagattcattgctgccaggagttaatccggcccagcaacataaacgtttggagcttgaaaactgagtcatatcaatccctatttcggagatgacagtgattgcgctgtcacgtttaacacccggaatagtcattagaaactggatcgcattttcaaaatcaggatcagaagaaatcaatttttctatttcacggtctacatcattgatttcagctgtgatataatccatatgtgcacggacgaggtgcatacgatatttttgggaatcagtcatctggtatccttcaatggattcaatcacggcatcttctttagatttgaggctcttaagaagtttagaagcgatttcttcatgattgatagaattgccagactgttcaagcaaatagtcaataatggatgtggatgacttcccaaagatatcggatacaacagaatccagtgcgacattacaaaccgtaagcgcattctgatatcgattcttttcactggaacggcaggaaacaatcttatagcgataccttgtgaactcgcgtaaaatacgaatctttttacaaggtatgtaactgccttttacaagtccaagtcggaataaatctccaatccatttagaatctttagtatcatctttgttgccttttacagcttttacccatttggggttggcaatggtgacattgatttcatcttcaagaagattaaagacaggaatccagtatttaccggtggattccatgcaaagatcatgacagtcattgtcaagaagccattgcttgaattcaagaattgaattgttaaaggtggaataacgtttcttctgataggaaggttcgataccaccagtggtagtaatgattgtggcaacgagaaatgatttgtgaacatcgacaccacaacaggttttgtaagtaactttcatagtcagactcctttctgaaaaagataagaagccattgactgaactgccacacaaattaaccaaggcgttaaaacaattcttagtgtacggtcttataaagccacttatttgtgcttgaaaaggcagaacttacactgatttaaatgctgtctaaaacgagaaagaatttacaactcctcctcccgtgctttgtagtgtagcttcttgaaagttattatcgcatgaagtagaggttttgaaaatctttcatcactatttgtgccgcgcctgaaggcgcgcggaatggagatttaaatgaaatactgccggaaattcggcaccgattgattcatggaaggccttggcccgccttagaacagataaaagaataaaaccgataacgaaattgatatctgtaagtctcctccgatttgaggatgattttaatctaacacaaatccttctcttttgcaagatctgtttttagatttaatgagattggaaggacgcgtccggaacgggccatgtccggtgtggtgaggggagtggctgaatctttcgtcccggagaaaacctatccttgggcggaggggaatatatagtctgcgcagctccaactcacgacaatcttccccgggacgaaagactcatgaaaccacctcaccgccccgtccactggccgtaccggcggcatcctcgcctgcttaatttttctattgacactgttctctatatgtattatagtgtacttgtaatagtaatacagtacagtacagcggaggttttttgtggaactatttattaataatcatgcaagcaaacccatctatgaacagatttccgatcagataaaagccttaatcataaacggagaactaaaaccgggagatgccattccgtcaatccgttcaatggcaaaatcgcttcatatcagcgttctgacagtacagaaagcatacgattctctccagacagacggatttattgagacaacggccggaaaaggctgttttgtttcggcacagaatcaagacttttatctggaagaacagcagaagaaaatcgaggaacacttttccgaagccatcgaaatcgcccgttgcagcggtatcaagctggataaattaacgagacttttaacgcttttatacgaggaggactgaccatggatgctttaactgtcaaaggattaagtaaaacctacagcagctttactttacagaacatttcctttcaggttccaaagggcacaatcgtaggattagtcggtgaaaacggcgccggtaagagtacaaccatcaatgcggtgttggggcttataaaaaaggattccggtgatatatcgatattaggcaggcatgattacgagatgacggccgctgaccgtgaactgattggcgtagtgtttgacaacagcaatttttccggggagctttcaccgaatatgcttcataagattttaaaagatatttatcatacatgggatgaagctctgtatttttcgcttctcgagaaaatgaatttaccgcgtgataagaaaatcaagaccttttccagaggcatgaagatgaagctgtccattattgccgccgtttcccatcatccccggcttttaatattagatgaggccacaagcggacttgacccggttacaagggacgacatcctggatttatttttaacttttgtccaggaggaagaaaactccattctgctctcctcccacattacaagcgatctggaaaaaatagccgactatattatttttattcatgccggaaaactcgtcttttttaaatcaaaggatgaattactcgcagactatggaattataaaatgcggcctggcccaatttggccggattgaaaagcaggatattattgcttaccggaaaatggactatgaatggcagattctggtcggtgacagaaagaaagccgagaaaaagtaccccaaagccatgatcgtccctgtaacaatagacgaaataatgctgctttatgtgaaaggagagacatagatgaaagggcttatcaggaatacgttttactcaatggaaaataatatcaaactcgcttttttgatggccggctttttaatattgactccgctgataaccagggaacccgttgttttatccatgattacggccgttcagatatttatctttatcgctaatgtgggcacgtcgctccaggccgatgaaatctcaaactggaaccgctttgaactgacgctgccggtgaacgttaaatcagtgattctggcaaaatatatttcattctgtatcctgatatttttcggatttgccgtcagcctccttaccggtctgattacggttgtaactgtaccgtcattgaacacaacttcgttgatttgggggtatcagtacggtctgacacaatccattacagtggccgcgataatgtttcctgtcatgctgaaaatcggcacagaaaaaaatgaattgataatcctgatatccgccttttttgccgggattttcatgctgattgtcgcagtattactcgctccgtggaccgcagggattaacctgcgatccggccttgtcggagcggcagctttatctgtttcaccgctgcttttgttgatttcctattttatctcgctgcggatctacaagaacaaggaattttaatatgggcaagctctctgtgcaggcggaccgccataataacggcaacagcggcagagataacgtcggaaacaggctgggcgaaaagaatcccatccatcccgataaatgacggcagaagccaaatcactggcacaaagcagattccctgtctgcacgctcccaggataaagccttcccttgctttgccaagcgcaagaaaaagggaggaatagacggtataaaagccaaagagcaggaaagtacagccgtttgccgccagggctttccggccggcgcggatcatttccccgtctcctttcgtaaagcctgatataatggctgttgaaaacagggctaaggtcagtccatagaccgcacagaatacggtcgaccatataatcgcggttctgaccgcttcacacagcctgtcatatttttcagcgccgtaattaaatccggcaattggctgaaatcctttgataaatccaaataccatcagactgcccatagcggtgattcttgttacggctcccagtccggcaatgactgaatcaccatattctttagcctgcaaattgatgagtgttatggacagacctgtcagaagctggaataccagggtgggaatgccgactttcataatttccgatatgattttcccagtaaaacagcagtcttgaacacggaaggtaaagacactttctctccgtaatacgtaacgtaaatacacaagcgcagacaccgcctgggaaattgcggtggcggttgccgctcctgtaacccccagtcccagaacatagataaataccggatccaggactatattcagtaccgcgcccgccatcaacgcacacatcgtggttctggccgctccctcgcttgtcacaatactgttcattgtgacattaaagacattgaatatggatgaggccgtataaattcctgcgtaggccaaagcatagggcaatatgctctccgtcgcgcccagaagtatcaaaaccggctccagaaaaagcagggcgcagacaatcattaccgcaccggcaagcagactgccgtacagcgctgtgcttgcagccttgttcgcagtttctttttcaccatagcccagcagcctggaaatataggaggccgcgccgttcccgaacagcagtcccagtcctaccactatctgcccaagcggaaatgccacagagattgcccccatctggctggttcccagacctccgacaaaataggcgtccaccagattgtataatgcattgatcatcattccaatcatggcaggcagccccattgctaaaagagctttggggataggcgcactccccagaagctccattcttctgttaccctcattcatgataacactcctttctttcattcgaattatatactatagtatatatcactatattttatagtattgtcagtgtcattacccataatactgtaatttatagtatgtgtcaagtaaaaagagaaggctttgttttccatgctttatccgacgcaaaaagcgcctgtcgtgattggctaaaccacgacaggcgctcctttatttttctttccctatctgttcttttctttctcagccgtccgcgccaggtaccgcaggcgccgtgttccatatccaaatccggctgcgattaatgtctgtgcattgagaaggaatccatcttatactgtttcagattctcatgcacctgtctggcatcggcctcggcaatcagcttatcccttgatttcttcgcttccatctcactcttatggctgctcgggccgccgacacagcctccgacgcaggccataccctccacgaagtcctccggaagtctgcccatcttcagaagcagcagcgctttcttgcactctgcggctccattacatttcaccaccttgatatcggcattttcattcgtctctttcaggcattccagaacagcggccgttacgcctccgccgttggcaaagcgctttccaaatacgctggcctgctggtttttattctcctccggctccagaactacgcctttggcgcggagcatggcgcgtatttcaccgtaggtcattgcatagtcggcatttccctggatattcagatccaaagtctcactcttcttggcaatacacgggccgatgaatacggtgacgatctcaggatcctccgctttcagcattcttgagacgccgcacatcggggatacggtggtggacatattgtcgatcagctccggataatgctgtttaatcatattgacgaatgccggacagcaggaagtggtcatcttcttaccctctttataggcctccgcccactcctcagcctccgcggccgccgtcatatcgccgcccaggccaacctccaccatatcggcaaacccaaccttcttgagggcggttctccagctgtcaaaggtaatatccggcccgaactggccttctgtggccggggccagcatggctactactttctttcccgcattaatcaggcggattacatctaccatgaaggtcttggaaccgattgctccaaacggacagctgtggatacacgcaccgcactggatgcatttcttctcgtctatcacgcagataccgtactcgtcgtaagtgatggcgtccaccggacacacctttttacagggtcgttccagatgagcgatggcattgtacgggcaggctgtcgcacatttaccgcactcacggcatttgtccgggtcaataaacgccttattattgcccatcgtaatggctccgaagggacaggagctctggcacgccttacccatacatttacggcagttgtccgtaaccgtataggaggcaatcgggcactcctcacaggccgcattgatgacctggaccacattattcgtgtttcttcccgtagggcacttgccttccgcaagacggaccctctgtctgattacttctctctctttataaatacagcagcggtaatgggcctgcggtccgggaatcattttgcccggaagttcgtcccttttatcatccaccagctgatcctcccatgccagcttcgctacctcgtaaagtacatcatgctttaacttcagtattgttgcgtcatttgttaccattttatatatcctccttgtaactgttaagtaggtttattccgcgggatgttaccgctcctgttactgttcacaggtagtatcccgccctaatagtacgtaaccgtaactcgttttcccattttttcgactgccgtcttaagctgcctcaccagattctgccggattcccagatcaaaggggagtcccggattctggtaagcgctgttaatggctttccccacatacaggttcagctccgtacagtcctctatcagaattttcgcaagcatggacgctccgttatttttgtccagctctttgaaaaagtcgtagctcaaatcttttttttctacaaaccggttcagtatgtcaacaacacggctgagagtcaggactccctccgttaccagctcaattccatccatataagcgatgggcgggatctccgggtccgtataatccattgaaaccttcagcggccttcccagctctctagaaagaatcgttgcactggttcctccggagacgatgcgggaagccgtctcatctttcataaactccgagataatcctctcatcgtcatcccggtccacgggcggccccgtcatcagatgcaccggtcttctgtcaataatctgcatcacggctaccgtcgtgtcatctcccggttttccctcatagagcttatcgcattcttcgcagacagccgccgcgagacgaatcgaagagatggcatgctccctttgtcttaccacaaattccgcaatatccttccagggccatccaaaggtcatggatttgcccacaccggcgtggatcgtgccgtcgctaagaagaatcagcgcatctcccttttttacggtaaaacggaactcattaatctctttatcctgaactacccttgtgttcctggggatcttgattacttccccgtcccggataaaaatacagcggggattatcatattccaccaggtaagcctctccgttattaaatacctggaggatggaaaatgtggcgtaggccacctgccggatctgacagatgggcagcgtctgcatgatggtttcgacgcactcttccaaagtggcgccgtttaaaaacatcgtaccgagaattttggcagtcagggtggagaggatgttggcttttaccccgctccccattccgtccgccaggatcattacatcggaatcctccgtttttaaaagctccaccgtatctccgcagaggatttcggaatatttattcagactcttataagtgacatctacggtaattcccattatcggacctcactttcgttcccgtcatcaatcaaagaacaaagttttgtaagtgtcgtttttgtttctgccgttgtctctcccagaagccccgctatttcctgggccaccatcatctgcttaaaaattactttctgggcaagttcaattgtggcttttctcttttcatactcctgctgttccagcttctcctccctcgtcacatcgataagcgtggcgattaccagattacctttggaaatataggcaatattctgcagggtggcaagcttcaggtccggataaagcacttttctgctgtggatattggtatgcgtcctgaatacctcttttacatcttccgtatcgatgaattctcccagcaggcgtcccttcatctccttgcgttttataccaaaatatttttccgtggccgcggagcattccaggatcttcaaatcttcgtcaatcaccataatgatattcggcgaggtctccataaccagatgggacatcgatcttgccctgtcaaaaaggtaggggatgcacatattaagctccgccttcttctggcagacggcaatcgctttttcgcggcaggtcggatagccgcaggctccgcagtttaattcctgttccggcctggttttgcccgtttttattaaaatctcacggatctcttcctccgtaggcataatctctttccgggcacggtttttaaaggtacggccgatggaaacagccctggccttctcgctcagagccgacagctccgcaggttctctgggaagcgtcgcctccaaatccagcttaaccttaaaactggataccgtagccgcggtagcagggccgttgatgcagcctccgtggcaggcgttcatctcaataaaacagcccttcacttcgccggtcatcatagcctcacagacgtccaggcagtccttgacgccgctgacataaaatttacggtacctgtccggctttgtctttgtcgtctccaccgaagtcagcagccctccgctgaccggataccgcaggttcgcgccgagatggcgctcgtcaaaatccgcgtcttcgcattcgtctattttaatttcttcttcctcaagccatcctttcagctcttcaaacgtcaggaccgcgtcggggctgaccgccctcattttctctttctcggcgatacagggcccggcgaagacaattctcgcctcctccccgtactcctcccccagcatcctggcatggattccggaagggatcagcaccggagccagatagtcaatgagttccggataatgaatctctatcagactcacgatgctcggacaggccgtggtgatgatgttcttcatatcgcccttttccaaaagcttcacatactcgccggtcgccatcgcagccgcttccgccgtatcacgtacatccgtgaagcccagcttcaaaagggcatctttcacctgccccctcgttttatattgaaacagcccgatataagccgaggaaagtgacaggataaccggcctgccctcttttataaatgattttactttttccagctcgctggacatcttttttgcagactgcgggcagctaatcaggcactggccgcacagaatgcagcggttcggcataatataagcgtggccgtcacgaatcatgatcgattttacttcacagtcgcggacgcacttataacaatgcttgcacatcgcggctttgaaatctattatcggcatcgcattctccctcttattgatggcggtgacctgtgcgcggggcatgcaggttattgtttaagccgtcctaaaatctctttttcaaagaattcttccgtcgtttccggctttacggaatacagttccccgtccaccgttacgcagactcccttcaggcaattgccggaacagaaatctccgtttaaatccaccttgccgtccagcttgttgtctgtgacaagctgctgaagcttcttaatcacttctctggagcctttcagatgacaggcactgccaatacagatcgatactctcattacttaaacctccctgaattcttctcatccattctatttactgttacggttcacagccctgcataaagcgcagttttgtgttcagcaactatttattaccagggctttcaccctttttgattctcttccgtcggctgcgcgtgaccccttccccagcagtgagaacaaagtcgttttctgccgccttccggctgtacttattatctcatattgtgatattattatcaatcctttgcgttatgttttcttgtattttttttaaggcattccctgggttttccacgattttatacagatttccaatacatttaacattttctttacaatccggccaggagggcttttatctgattggaagattttcatatgagacaaaaaaggggtattgccatgatccgatatctaatcggccatttgacaatactcccttttctgtaatttttcccgtctgatttattttgccgccgtttccaggctctcctgcaggatggttccgagtccgtccaccgactgatcgatatcctgataaagctgctttacactgtcaggagccaggacttcatcaaagaaatcattggcgtcggctccaatcagctcaaccggctcaagcccctcaaatcccggcgctccctttatctcctgccctgcccctgtttccatgccgctgcaggccgtcagagacactgccattgccgccgcaagcacggctcccatcatactgctccattttttcataattttcctcctgattccatttcaaacttattttacagtcgtctgtacaagcggcctttatgccgatattataaggggtgacgtatggaaattctaatggtatattttcacataaaacatagtaaatccgcatagatttcagtcaatttttaactttttatttgcaccggacgcctcttgtttttttccggccgatcctgtatagtaaggttagttcgcgctcactctgaagcatccggccgtctgtcaagggattggcttcctatgctgaggaggaagcatgagtttatggcaccctctttcagagtgctgtaatttccggtactcattaccggctgtttctcatccgtttcctcggtgtgggctgcgatatcactgcttttcaataccacaaaaagagaggattgagacaattatgaaaaaattattacccattctcatggcattcgccatgaccgccgtatcccttactggctgtgcatccggcagcaagaccgcagagacttcggctgccggcagcgcaccgtccgtacaggccgaatcatcggaaagcgctgacgcttcggcgtctgctgaggaaacagcttccgaagacgtttcttccgaaaacgcttcagacggcgctgagaataactccgaaggcgctgtccgtgtaggttccctgaaagggccgacatccatgggccttgtttccctgatgaactccgatacttccgccaaccagtatgacttccggatggtgactgccgccgacgagctggtcgcttccattgcctccggcaaactggatatcgccctggtccctgcgaacgtggcaagcgtgctgtataacaagacggaaggaggaatctccgtcatcgacattaacaccttgggtgtactctacattgtttctgccgatgattccatcaaatcagtcgctgatttaaaaggcaggacagtctatctgacaggcaagggtacaacccccgattatgtgattcaatacctgttaaaagcaaatggcttatcggaacaggacgtaaaactggaatataaatccgaagctgccgaggtggctgcaatccttaaggagaagccggattccatcggacttcttccgcagccctttgtgactgtggcctgcgcccagaacgagacgctgaaaatcgtactggatctgactgccgagtgggacaaggtacagggagcagaaggcagccgccttgtaaccggtgttaccatcgtcactaatgaattcctgaaaaataatgaagaagccgtgaaagtcttcctctcagaccacaaagtttccgcaaaagccgctgtctccgatcccaagacgaccgccgaacagattgtacaggcagggattatcgagaaggccccgatagcccagaaagcgctcccctactgtaacattacttttatcgaaggtgaggaaatgaaagcggctctgtccggttatctgaatgtcttatttgaacaggatccgaaatccgtcggcggaaaactgccggccgacaatttttattatatcgagaaatagcagtgttatttttcacacggtaatgtcccacgaggtgttttcgtgcgtattttgcacgaaaatcccgagttccacggcgcgaaacgatgttttttccgtttctgcgcatcgcgaagcgtgttatttttcacagcattgccgctttttggcaaaggtgtgaaaagtaacataacggtaaccgtttaaacaaatgaaccgttacaaataacaactacggggcatatgacctcgatccggagacaggaatatgaataatctgaagcatttaaatacggctgaaaaacataataacggcaatctattaaaaaagaccgggatttttctgttctggctgattttgtggcagattctgtcttcctccatcaataactcaattatatttgtggggccggccgatgttctggcttcactggcggcacaaattaccacgccggaattctggaaaaccatcggcctgtcttcattccgcatcttcattggatttctgagcgcttttttctgcggaatcatgaccggctgcctggctttccgtttttccttcctggatgagcttctggccccggtaatgctgcttgccaaatccatccccgtagcctcctttgttatcctggctttaatctggaccggctcggagaacctgtcggtatttattgcgtttacaattgtactcccgatgagctataccgcaactttgtcaggcctcaaaagcactgatgaaaaactgctggagatggcattcgtattccgcttctccttcccgcggaaagtgaaagcggtctattttcctgcattactgccctacctgatgaccagcgtcaggacggctctcgggatgagctttaaatccggagtagccgcagaggtaatcggagttcccagccactccatcggggagcagctttatatggctaagatttatctcgacacggccggccttttttcgtggaccctggtaatcatcgcagtcacatttttaattgaaaatctttttctgtttttcctaggctccctcggtaaaaaaaatcacgccgggacaggatgcaggcggacaaaaaaggaaaatatgcagaattgatacggaggttatcatggaactgatactcgacaatatttataaatcatatggctccctgccggtcctctcaggcgtcagcatgaaaattgcatccccggatatctgctgcctgatggccccgtccggaaccggaaaaaccaccttgttccgtctgattatgggcctggagaaaccggattccggcacaatctgccctgcgccggaacaaatccggttttccgccgtatttcaggaagacaggctgatcccggagttttccccgctggagaatgtggccctggccctgccgggccgtcccgacaggccgtcgcttttcagggagcttgcaagacttctccccgaggaagcgatcatccgcccggtctctactttaagcggagggatgaagcggcgctgcgccctgctgcgcgccctgctggctccctgtgatatgttcattttcgatgagccgtttaccggcctggatgaaaagacaaaggacagggtcatccgctatcttcttgagaaaacagacggacgtcctgtcctgatgtccacccatgaccggaacgatgccggggctctggggctaagatattggaatttaattgacgggaggagggctcgtcctcacctgcttatttatcacctgtgaaaacaggtattccctgagtttttccacatctccgtccgcaaagcagtatcctttcatgccgcaggccgctgccccgtcaatattagcctgtatatcgtcgataaaaaatgattcctccggaagtatcgagaacttctcaaacaaacgccggaatatctccggctccggtttcagcatcttctcttccgccgagacaagaactccgtcaaaatattcgatgccgggtatttccttttcaaatacacgcagtctgtgggacgcattggaacagagatagacggcacatccggcttcttttatctgcattacaagctccctcattcccggcttcggttctatattaaactcatgccagtgggccagacataatcgggccatctccctcgttctctcgtccggcagtctcttctgcacgcgtcttaatgcctcttcctccgtgatggttccccgatccagaagcacccattcttcggcaaaaaacagttccctgctcatcagctccacatcctcgctgctgtccgtatactgccagcagaccctgaccgcatcatagtccagcaggacgcgtcccatatcaaatacaatgtttttaatcattctttcctcctaaagaccggcagcagacgctgtcgctgcaatatttgaattatgaaaggccctggccctttccaacagtaaaatacaaaatcagcacgataacggcaggcgcgacaaaacgcacgataaactcccaggcccttctgagacggaacgggtaccggcccccggagctgatttcctccgacgccttcccttttccccaaatccagcctgcaaaaatacagaaacagagtgaacccacgggaatcatcagattatcagtgaacttctccatcaccgcattcatcggcagcatctggattcctttcgaaaagtcgaaccagggcaggttgatattcctcgactccagctgggaaagggaatatcccgcgctgagaaacgccatcggaaccgacaaaatcacagtcgccttcagcctggaaaccttccattcctccgtaatgaaggcaacacagctttccagaatactgattgcgctggtgagcgccgccaaaaacaggagcacgaaaaagaacagtccgaagatccttcctcccggaagcccgtcaaatacctcaggcagggccataaaagcaaagcctccgcccataccaaggccttcggctcccagggtaacaaacacaaccggaataattgcaaaagccgccagaaatgccaccagcgtatccagaacgcagatgcaggccgcgctctttacaagattgtcttttttcggtacataggagccataagtcaccatgattcccattccgacggagagggagaaaaatgcctgtccaagcgctcctactaacgtatcccggttaaagcttcccggtttaattgtgagcatgtaggaaagcccctctcctgcacccggaagcgtcaccgcccgtaccgcgcaggcaactaacaggatgaacaaagccggcatcagaatcttgctgaccctctcgataccctcagaaacgcccttcacaacaacatagatacaaagaaccagaaatacgaaaccccatgcaagcggctgtaccggttccgagataaagtttacaaaatattcctggtaagacacggttccgttgccaaaccccggctcggccaggtaggcaaaaatatatttaagaacccatcctcctaccacactataataggacataatgacaaagagtgtcaatacaccgattccgcctgcaaacgtccattttttattgagctggtgaaacgcccctacaacgtttttttgtgtagctcttccgatggaaagttcagccagcataaccggaaagcctaccaaggccacaatcacaatataagacagtaaaaatgccccgccgccatatgctccggtctttcccggaaacttccagatattgcccagaccaacggcagatcctgccgccgccagaataaatcccatattgctggcccactggcctcttctctgattcatgataattccccctgaatataatttgttaagcatctgtaaatgcggttgttcccaagtgtttgtatttctgggacaaacacccgaaacgcagacgcacgtctgctataatagcagatttatacagaaatgtccattttccggaggtcacccagatatacgaaatagttattccagctataacctgcagctatttcatgtatttatatggcggaccattgtaaaatttatacggacatagccttttccttgcccgggactccttttccgcagtccacccgaagaccagccgcaaagccttattttccggcacttttccggtattttcccggccgtatattcagtgaaatagcaaaattattttggaaaaataaattttaatgaactttttattcccattttctcgatttaatggtaaaatagttacaatagtgagttaggaggtgctgaatatgaagatgattatggcaattatcggaagcgaggatgcggatgatttagtttacgaattaaaccagaattctttctttgttactaaactttccaccatgggcggttttttaaagaagaaaagtacgactctgatgctgggcgttgacgacagccgtgttgaggaagcgattaccattatcaaaaagatgtcaggaacaagagaacaactggtttacacaccaccaaccatggccgggaactgctgcccaactgtcaatatgacggttccgatgaatatgaaggtgggcggttccacaatctttgttatgaatgttgaagatttccagaaattttaaccataccgttttacggtgtgacagttctctacagaaaaaagccggatgattcatatccggcttttttgcgtaacagttcagccatgatgtattccgctaggcgttttttgccgtttctgtgcataattgatgacggcgacctgtgcgcggagcgtgcaggatcgtttgttgcagttcggacaaaggccgaactgcaacttttttgcacccggaaaatataaaaagattgactttttgaaacccagcctgtaaaatcatataaaagtgaacacttgcacgaggtgaatagatggatgctacaagccaaaaaatcatagatgcgacaatgggattaatcagagataaaggatatgtcgcaactaccacaaaagatattgccagggccgccggagtcaatgaatgtactcttttcagaaagttcaagagcaaaaaagagattgccctcagcggaatggagcaggaaaaatggcgcgggaatctgacaccggaggtatttactaatgtagtgtgggaattacagccggatttggaaatgttcatgaacacctacatggagaaaatcaccccgatttcgtcaacctgtccatagggctgagagcgccccagttatacgaggaaacggctccgctgattatgaaaatcccccaggcctttctctcctccctgaccggctatctcgaggagatggaacatcgcggcaaacttccccgacaggattttgaatgtcttgcaatgacaatcttctccgcaactttcggctttacatttctgaaggcctccttcggagagaatctgaccaaagcggagcgcagggattttgtcagaaaaagtgtggaaacctttgtcggcggaataccgcagataaaataaacattttgtacctgtccggtgaaaaaatacagaaccggcaggcttttcaggggccattgacagaacaggcactgccggacggcagtgccataatctgacccgttatgcaagcaagtgcatgcattctaaatattgaaggaggtagctatcatgatatcaggagccgaattatttgttaaagcattaaaagcggaacacgttgacaccattttcgcttatccgggaggacaggctatcgacttatttgacgcactgtatggagaaaagagtatccatgtcattctcccgcgccatgaacagggcttggttcatgcggccgacggatatgcccgttccacaaaaaagaccggggtgtgcctggtgacgagcggcccgggcgccacaaatcttgtcaccggaattgcaacagcgaattatgacagtgtcccactggtatgcttcaccggtcaggtgcccgtgggcctcatcggaaacgacgcattccaggaagttgatattgtaggcatcacaaggagcatctgtaaatacgcggtcactgtcaggcggagggaagaactgggaagtattatcaaaaaagctttctacatcgctcatacaggtaaaccaggtgtggtggtcgtggatcttcccaaggatatccaacaggaaaacggcagcggcatctatccggtgcagatcgaactcaggggctgtaaaccgaacgtttccgtccatatgggccagataaaaaaggcggtcggactgttaaaccagtcagagaagcccgtctttttagtgggaggaggcgtcctcatttcaggtgcggaacgagagatgacaagactggcagagatgacaaatattccggtagtcacgacgatcatgggtaaaggcgccctcccttcctcccatcccctctacgttggaaatctcggaattcatggatgttatgccgccaactttgccgtcagcagctgtgacctcctgttttccatcggaacaagatttaacgaccggatcacaggaaaaatcggagattttgcaaagaatgcctccattgtccatattgatatcgattctgcctccatttccaggaatattgccgtggatgtcccgattgtctcagatgcaaaagaggcaatcctcgcccttcttgaaaaagcctgcccgctgtgtactgaagaatggctcaggacgatagacggctggaaacgcgaacaccctctcgcagcagaacagcccggattgacacctcagcgcatcatccaatccatcaaccgcatttttgaccgcgcaattattgccaccgatgtaggacaaaaccagttgtgggccacacaatttctggagcttggggagggcaggaagatgctgacgtcgggagggcttggaaccatgggctacggttttcccgccgcaatcggcgcaaaggctggaaatccggatacggatgttatcgtcatatcaggtgacggaggcttccagatgaacgtccaggaaatggctacagccgtggcatacgaactgcctgtcattatctgtattttcaataacggctatcttggaaatgtaagacagtggcaggaaatgttctttgaccggcattactcctccacctgtatccaacgccgcaaaagctgtcccctcccctgcaattccccgggtgagaactgtcctgactatatcccggattttataaagctggccggaagctacggcgccgccgggatccgggtaactgccgaggaggagatcgacaaagccctgctcagcgcaaaacggaacaaaaaaggtcctaccgtcattgaatttattattggccgggaagaaaacgtcctgccgatcgtgcctccgggaaaccggctcagcgatatgatattagaaaggaagggataaatgatgaaaaaacgatggatcagcctgtttgtagaaaatgatatcggtgtcctggcacgaatctccggcctgttttccggcaaatcctataatctggacagcctcacggtcggaagaacggaggataggaccgtatcccgcatgacgatcagcctgacaggcgatgacatgacctttgagcaggtaaaaaaacaactggcccggtgtgttgaagtgattaaggtggtagattttaccgatgccgccatccacagaaaagaaatcatgtttatcaagatccaaaactgtaccgaagcggatatgactgagctattcaggattgccggcgtatatcaggttaaaattgccggatactccccttcctccgtcctgttagaaagtgtcaggacagaggaagaaaatgatgagctggctcatcttctggaacatcgctttacaaacagaatggaaattgtgagaggcggaagcgtcgcagtggagtcggtccgcacttaaattgctccgccatcactcgtcccgtcattaacgctgcaccacacaagccggttgtccgctatttccgcagccgcctctcccctgtcatgcagccaggagagataggaacgtaccgtacttcccaccagcacatactggttataatccattacaagcccgtagtgttcgaacaccgctttcaggatctcctcaaagccgcggggctttgtgcaaatctcctttataatgccggcaatttccagaatctttttcctgttcgcttcagccaggggcctaatatcctcaaccggctccgcatgggccgggatatacagcctcccttccagtgttttaagcttttcaaggctgtttaaatactcctggacatcatacaaaaatgatacatgatacttttcaaggatattttctccggtcagacagtctgccagaaaccacacgccgtcgtccgtcttaatagccgacatggaaaaggagtggccgtttacagccatcatctccagcccctcaggaagtacctccggggtcaggggaagcgccccgctcggctgggccatcagaaatttgttgcgaagctccttaaacggataaccgccatataaaaaagacggttccagaaccggatactgtgtaaatgccagatcaggaccggccgtatagacggaacagcctgtcctctgcgccagaaggctgtttccgccgatgtggtcggcatgggaatgggtgttaatcaccatcttaagcttccatccgccggcctccagtattttcagaacctttttccccgcatccttgtcgttgccgctgtctatcagacagacctcgctgtcattcagtctgtaaagccccattttcgccgggcaattaatataatatgtcttttctcctgcctgaatcagttcgtacatgctccttttcctcctttttgttttcactgccagcatagattcttattatgtccgccgtctattcatccggtccggtattccatcaatattctttctccctgaatatgacgacggccagcggataggatactgcaaaagctgccgccgaacataaaagtaaaatgagcgcacttgtaatcacctgccataccgccggttccgggccgaaatacagattgatcaggctgacaagtcccataaaaatcaggattgccgcaagcaggctgatgcccaataccacttcgctccgctcttcccctgtcaaataaaaaagcgggaaaaagattgctaccatcaggagactgattccaactcctgcggcaaacagaagaagaatatccgtatttcggtcaaagggaaaaccatgtaacagccatgaaagccccaccaccgcgcctgcaaaagccattccgacaaatagccagattaactgactgataaaatggctcttcacaatatccgcccgcctgactggcgccgtcaatttatattttccccactttgagataaactccttgcgcaggctggaactcatattgactgaaaatccaatcacagcgagaaatatgtagccgatgagaagcgattggctgattacggcagccgcaaaaagtcccaaaaggagcataaagcctgaaaagacttttgcattggcacgaaccgcataataattatttataagaagccccctcatacccgatccccctttaccagcaaaagcataatttcatcaacagagacatggtccatcacaatatctttatatttttgctgtgcttttcttccgttttctacaagcacatcaatctgaaaatcccttttcctgtaagcaagaaaatcgcctgggtccaatgtgagaaattggctttctttgcagcgcataacagcaaaatcatatgccagttcatttttagacgcggtcataatcagccttccgttatgaataaatgcgatataatccgcaatcttttccaaatcactggtgatatgggaagacagaagaatcgaatggctttcatcctgcacaaactctaaaaatacatccagcatttcctcacgcataatggggtctaaaccgctggtggcctcatccagaatcagtaattggggatggtgcgacaaagccacggcaacagctaacttcatcgtcatacccctggaataatgtttgattttctgtccgtccggtaaatgaaagacttctaaatacctctgaaacaaagaatgatcccactgcgtataaagtccctccatcaccttggataattgtcttgcattccagtaagaaggaaaattatcgccgtcatagacgacgccgatttgctctctcatatctgtatctgagtccagcatttcccggccgaatattttcactgtcccgctgtcctttttaattgtattgagaatgcagctaatcgtagttgtcttgcctgctccattctccccgacaaatcctaaaacagccccgtatggcaatgaaaaagttacattatccagaacaaaatccgactttggataagtcttggatacctgctgcagctctaatatattctccatgctattcgtcctcccggtaaaacattgccaacagctccgtcagtttttcaagggaaatattgctcgtccgtccgatttctgcagccgcctgtaaatgttcctctgctatacgctgctgctcctcctgataaaattccttgttctgtgccgatacaaaacttcctctgccaaccgttgtctcgataaaaccgtccctttgcaaatcttcataggctttttgaaccgtaatgacgctgacatggattgcttttgccaatgcgcgcattgacggaatcgcatcaccggccgccagttccccgctcattatcatcgcctttatctgtgaagtaatctgctcatagatcggcttgttggcattattactgataataatttccataagccactgccctcgcttcaattgtacttaatgtacaagtacattatatcagcatttcagcctacagtcaatcagaagtagacgatgttaaaaggggcagataaattaaaagcggcggtatcattcacgataccgccgcttaaactctgcactgagaattataattcagtgcgggtgacaggacttgaacctgcacgtcgtggacactagatcctaagtctagcgcgtctgccattccgccacacccgcttttatcgttctccggtgaactcccacacagatactatcaccgaaaaacagcaatactattatataagagagcagcaggttttgtcaattagatttcatacgttttctctaacaggtcttcacatttttttcacaaagattccaaactttcgacacatttattctgtaatataataatcagcaggcaggacctgcagtaatactttttcatactcctccggcaggattgattcctgccggattcctctgtctaaatctgtttatttcccaaaaccataccgttgcgcagatggagactttgactacccgaaacaaggtcatgcccacataaaaaaacattatttccaaacactgttaatacagtctctcgaaataatgttttttaacgtatataaattcaactctataatggagcatacgggattcgaacccgtgaccttttgaatgccattcaaacgcgctcccagctgcgctaatgccccgttcctgtatatcactttttcagatgttgatattgtatcataaaataataaaaaagggaagagtgtttttatattttataatgtttttattatttctataattcatgtttttaatgaaattgcaagaacttaaccccaactgaaacctgcatagtttttccgtatccgcagatactaataaagctataggaaaggatggtgaacctgatgaaaaatgtatatgatgacggcaatattcccgaaatagatttgccgaaaacctccaatgcgacatacgacgtaccggatgaatttccggtcagcacagaaccgcttccggaatccgaacgtccaagaaaagacggacctggaggaaattaaagaattctttggaatcatctcctgctgcctgcccaggttttatttgactgtggctaaccggcagacagcagggttgattttatacataacctgcacctgcttgcagaattttgccacaaggtagttgacaaaaacctgttaccgtgataaactattcaaggttcaaataaccagatgctgctgtggctcagtcggtagagcgtcgcattggtagtgcggaggtcacgggtccgattcccgtcagcagcttatttagagtccttgattttcaaggacttttttgtttttttcgatgaaattagtgattacatttggttacacttttacataatattttgattagccaataaatcatttttatttattactccaaagcatacgtttttttagtttgtgcattgagcgaaacgaaatatcaatcttattacagattttcctgagtgtcctattgaaaaagtatgttttaatctcccatactcattatcataaaataaataatcactttttaccccattttgaaaattcatgcgcttgatcatccccaaaatctttattgcagaattggaaagttcaatgctatccatactactttcacttttgggaaaatctcttacagcatacactgttttaccattctgatccttatatttaatctctgtgcgttgaatgtataacctatcctgttcttgatcagaatattttaatgtacatagttcaccaactcgcaaccccgtaagtagagccattccccccccatcctttcacatcttcaatagataaactaggtacaatataattaatgattttaacgaccttggatcatcactattgattattttataatacgtatttgtacgcgacattaccaactcagattgaataagatatattttgatggtatacttaaaaaatatatgcaggaagaatatggcaaaggagatcagtgttctcatagagcaaataccacataaaaggattttcttattcgaaggggcgtgactaatgttaaaaaacaaattaaatagatatcaaaaattagccaaggtaatggcagtttttcttttaatattgttggctggatactatataatttcagcctcctacacaaacagtattattgggggacttgaaaatatcaaggagcatcctttcccagttgctatcgcagcgggcaaaatggaaactaattctcgcgaacttcgcttaacggtagagcggttgtgtacggacagaaccattgatacattagatgaagtgaagaggggattagcagaaaaccaagaatctagcaatcaggcattggaaacaatagtttcgctgtatctgacagatcctccagccgctgtaaagctcaaagagcagtataatgatatgttggaacagcaggagtatttaatagaactgtgcgagcagggtggggtttcagatgaaacggtcatgctatatgtgaaggaaaacattatacctctgctcgatgagattgacaccgctttggaaatacttattcataatgcaatattgatgttcgacaccttgtaccttcaatcgctttcttataagcggattatgtttattttgactactgtattaatcagtgtgatagttgttacgctgcttttgtatcggtatgtcttatccaaacgggaggtagaggccgttgcactccaaaaacagattgcgatagctgcacaggcagcaaatgatgcaaaatcacaatttctgtccagcatatctcatgatatcaggacgcctatgaatgctattatagggatgactaccattgccagtaccagattggatgacaaggagcgggttaaagattgtctgaataaaatagccacttcttcccgccatttactggggcttatcaatgatgtattggatatgagcaagattgaaaatggaaaatttacaataaacaaggagccggtttgcctttcggatttcatgcacgactttatctctattattcagccgcaggtgaaagctaaacatttagaactggatttatctattttgggaattgaagatgagattgtcattacagattctctgcgccttcaccagatcatgcaaaatattatgagcaacgctatcaagtttaccagagagaatgggaaaattagtttacgtatggagcaggccccatatgaccgtgaagggtactctctttatgtattccgttttagcgacaatggtattggtatgagcgaggaatttcaaaaagttatattccaaccctttgagcgggcggcaacttccacagttagcaaaacagagggaaccggactaggaatgtcgattaccaaaagtattgtggatcttatgggggcagtatttcagtcatcagtcgtttgaatgaggggactacatttactgtcagtcttccgatgcaaaaggaacagcagaaggaatgtattgctactgatctgcttaaggatctgcgatgtcttatagttgacgatgacagggatgtgtgtgaaaatacggttcttttgctgaaagaaatcggaatgcacagtgaatgggtattgaatggggcagatgctgtagtctatgtagagtccgcccataaacgacacttagattataatgcagttattctggattggcagatgcctgatatggacggtatagagacggcgcggaggatacgaaataaagtaggtgatacccttcctattattattctcagcgcctatgactggacagagatcgaggatgaggctcgggaggttggcattacggcatttttagcaaaaccacttttcaaatcgcgcttgtatgaaaccatgcgtaataccttaatgcctacaccggatacacagatggagcagaacggattaattgctcatgataaagcatccgggcgaatactgttagtggaggataataccctgaatgcggagatagctcaaactctgttgaccgattacggattacatgtagatgtagcgagtgatggtaacgaagcactggaattctttcgggcagataccaataaatatgatattatatttatggatgtgcaaatgcctgttatggatggctatcatgcgacagctgcgatacgtgatttggaatcgaagaattttaagcatagccacacagtaattattggtatgtcggccaacgcgtttaaagaggacgtagataaggctttagcatgtggtatggatgactacattaccaagcccatcgatattaaaaaacttcaaaatttattgaggaagttttgcaaaccataattgcagagcagtacgtaaattgaagaagggttatcatgatacaattgtcgaatcgataaaaagcaatttttatctatgatggaggtgaaatatatgcgaatttggaaagcgatattttctatttcaacgcttatttttggtgctattggcctgatgaaattgttaccttatgatatttccatgccttttatgtttttctttatggggttgacactattgacacatgcaaaagaatgttatgataaaggctctaaacgcgatgcagttatctttataggagttgttatttttgtttatgtaattactgcatataatttgatttctaaaacggtttaattccgcacatacattcgaatttatatggagggtattgccgccatacggaaacattacataaacgcatgggagatagctccgtgaccgcgccctagcaagacgcggtcacttttgtgttactaattctattagccatttgtaccaaattttataggctcaaccgtctaacggtttctgtttattctgctacatcttgccaatcagcaactttagacttgtcttccaagtacttcacaagatcatctggcagtgtcagagtttcctctagagcaggaaataagacttgaacttcccggggagtatccagagaagcataaagcactatttcattttttagttccatagtctcaagcatttcttcctgttgtagtatggatatataatgcgatttgaccgttaaagccttgtctgctacggcggcatagatattatataaccgcattttaaatatcttccccatttgtgttttcatataattatatcaccgtccaatcatttacaatcatctaaaaagttaaggtttctatgctttccaatgattatatcaccgcccttgatttacaggcgttttcaataattgtagtctgaaattactaccagtttactacttacggggttcgctttgatatgccgcagaaatccttttgaagatagccctattccgccgtttaaaaatggcgcggcacctcctgtcacgcagtaggggcaaaggaagccttgtatcatgggactttgcaggcgtgaaaatcaagtggcgagggattgatacctttacctttaatatcggcattctattgcgtgacagtaagcaagaaacgtttctataaaaagtggcattatagggtgttcatccgcctgtatcgggctaatgtaattataaaaagccccaaaacgaaaagggagagtatgacgacagattgtatgctagaaaaccaagatctgccctgtaccataccgttcacattgtcaataaaccagcgtaccgggctaatcacgctgaatcgttgcagcatgacaggcattttctcaaatgcaataaaagtcccgccgattagcgataaaatcatggcaatacaggtaattgatagcgaaaagagccaccaccagatgatagcagctctttccgtcacttttccttttaatagctattatattcatattttcatgcaaactttttgatatcctgtcagtcctttttggcttccccattccagataccgtttttgtctacataccacccgtctatccaggcgtccgtatacatgatccccctctgtccgtcggacacagggttaaaatagtaccatttcccatcaatctcacgccagccggtcaccatggccccgcttgcgtcaaggtaaaaccatttctggtaaaccgggtcaaaatgccagccggacgccatcgcgccttccttcatcccgccttcgtcctggcagtttcttctgtatgcaggtaataccactggttcccgagccactgccatccgatcagcatcttcccgtcgccgtcaaaatagtacctctggccgtccacaattccccagcggttcttcgcataagcgccgtttgtctgccggaacatccagataccggtatcagtctgcatccagacaccccggaggatatccggattggtataggagctgccgccagtggaagaaccgccgccgctgtttttataggtcgccgtcacggtcacggctttggcgggcatgatgaaagtggtgcttgctgcgttttcattggcaaaggccacgccgtcctgggatgtccacttgacaaagacctggcccgcaggcgcgggagaggctgtgacgctcacctgcgcgcccgccgggaacttgccggtgccgtcaccgtttgtcacattgccgtttatcacagtgaccgcagcgataaccgtaatcccgccgcccggcgttccgttcagcttgccgcccggctctatcacaatagttccgctcccgaccagcgccgctcccgggtcaatggtaagctccccgcccggcccgacagtaatcaccgttcccggctccatggtcacagtcacaccggcccgatagtgaccttcgcttcttcccctatggccacattctgattgatcgtcacatccccgtccaccgtcaccaccgcgccgggggaacgtcatcccggccgtcccaggaggcggttgggagatccgcgttttgcagcatctcattcaccagaagctgggtgtgtgggtcgctgcagtggatggggatattgtgcggaaaggcgttggtcccaatggacgtaagccgcccccggataacagcccccgtaattccggttccgtcaaatgcggccgctccaatgccggttaccgaggccggtatgtctgctgttcccgtcaggccgccgcaggacccaaatgctttcggcccgacttctctcagactgtccgcaccgctaaggtccaggccggtaattccgcttcggaaaaatgcgtagtcgccaatctccgttaccgcgggcgggatgcgcaccgttcccgtcaggctgttgcagaaccaaaatgcgtggcttccgatgtaagtcaggctgtccgcgccaccgaggtccaggccggtaatcccgctttctgcaaatgcatagtcgccaatctccgttacctcagatggaatgctcaccgtaccgattaagtcgccgcattgggaaaatgcgctgtccccaatgaaggtcaggctgtccgcgccgccgaggtccaggccggtaatcctactgtttagaaacgcagcatcttctattctgcttaccgaggccggaatccttaccgttccactcatatttgtgcagcttatgaaggcatccattccgatacgggtcaggttggatgcatgatctaaggacagagaggttatgtgagaattgccctcaaaggcgaactctgcaatctcggtcacccgataagtcacaccgccctctgttaccgtggcagggatggacacagcgccagtaacgctataactgcggatcacggagacggtatccgccccggtgacctgatacttcagaccgccgttaacaaactccgtaacaggaggaaggttggggcgccgccgccggatagtgtgattttgcctgcgtccacatggcagtcccgtaagagcagggcgacagcatcggtggctgcgacaaagcttgtaatcccagtggcatcaaatgcaaatgattcaattacagtcacggtggcaggaacatgcacggtgcccactaagccagcgcagtcgctaaatgcccggaacccgatatgggtcaggctgtccgcgccgctcaaatccagcccggtaattccgctatatgaaaatgaataatcgccaatttcagctaccgccgccgggatgcgcaccgtccccgtccagttggtgcacctgccaaatgcgcgtgtaccaatacgcgtcaggctgtccgcaccggtaaggtccagaccggtaattccgctataaaaaaatgcgaagtcgccaatctccgtcactccggatggaatgggcaccgtttcccttaagccggtgcacctgctaaatgcgtctgcaccgatgcgtgtcaggctgtccgcacccctaaggtccaggccggtaatcccgctgcctgcaaatgctgagtcgccaatctccgtcactccggatgggatgcacaccgtttcccttaagtcggcggtgtagctaaatgcggatgcaccgatgcgtgtcaggctgtccgcacccctaaggtccaggccggtaattccgctatcgaaaaatgctaagtcgtcaatttccgttaccgcgggcgggattaccacggttcccgttaagctgctgcaatagataaacgcgccgcttccgatgcaggtcagattatctgcgccgctaaagtccaggccggtaatcctgctgcccataaatgcctcgttcccaataccggtcacggcataggttttgcctccgcttttgatctgtgcgggatatgcaggatgccctgataagcgccatccacaagaccggtgagctgaaccgttctcggcccgatttcctggtagagcaggccgtccacgttgtacctgtcgttgatggtcagcgcgctgacgcccccagcgtcaccaggacggacggcggcggggcgcagtcgtagccctccggcaatatggccgtgaaggtgaattcccccgtcaggggccagctgccgtcctcatcctgctggtagtccgggcagctccagccggtgatgtccaatgtggccggttccgtcttgccgtcaatttccgcgctgatctgcgtgggcagcatggaaaccacggtgtcaaagtccgcctgattgtccatgctcacgccgggcagggccagctcgccctcggtcagaaaatcatcgtccacaaacgtccagccggtgacggttttgacacggctatcattcgtctggggaatcgactgattttccgtggcttccgccgcaaccgtcacggtgattcgcggcagctttacgccccgtgacagcgtatagccgcccacgtccgccgtgaatacatacttgccctctgtatccccgtcataggccggtacgctgtcccaggtcacagggatttcttccgaggacgtggtgacggtggtgaccgtttccccgctgtcctttgcggaagaatccccggcgtgattgccagtcccgctttcatctgcatcactggggctggcgatagaagaatcatcgctttcatcctctgtattgtccttgtcaggaattaccgtttcctcgatgacgtgataaattgtagccgtcactgtgtccggcaggttcaattccgaaagctctgttcctatggtcactgtttgcttcttaacgctgccggggagagcagcgaaagctgcgatactcccgtcctccggtacgctgtttttcgccagtgccaccgtcgaaagctgtgtcacaaacaatgcagcggacaatatcaccgcccaaaatttcctgtttctttgctttttcatagtattccctccttctttatttccttttgattttcatggtatatctgtgagcagggctgttccccactgtcagacagcaatctgtccataccaagcagcagttccagttcacttctaaattccaccgtttctccatcggctgtcagttttccctgccaggtagaattgccgcattgttcaacctgaacctcaaaggttctcagcacctttgactgtgtcatacgccacccctcctttttcctttctgaacaagatccggtatctcctcccaacaccttatcaatgcctgctctaacttcctgtaagtcaccggttttttaccaaaccagcttatgcacagacgatatgcctgcaagccgaaatctaaatcggaaaaccagataaacctcctgggcggcagatgtacattggtgagggtgtccatcccttccacaccattctgagcaatgataatcacgtccggctccgcctgtttcaatttttcaaatagctccggccagtcggcagctccctgtaccgcaacctcctgtcctttgtcatcactaaacaccttaacatattctataatctgttcccgttccgttatgttatcgtcacagacaactacactccacatacgctccctccttttccatatgattatcttcttaatttcaataataacgaaaaagaagcgaatttcaatgggttggcgtcaaactgcaagttttggcgtcaaactccattgcgcaaacccaatttattttgtaaaatggtattgacatagaaaaaatctgtactaagagcctgcaaatgctccgacagaaagggggcgctttgacaatgaaagctgccattatagacgaccttgcttcttgccggggtgaaatccgggcgtgcttaaaccgatacctggacgaaaactacgcgggggaaacacccgtgattgaggactttgaaagcggggaagaatttctcgctcacttcaccccggaagcctatgatattattttcatcgaccagtacatgaacgggctttccggtatggacaccgccgtaaaaatcagggaaaaggacgatgttgttgctgtggtgttcgtcaccaccagtattgaccatgctattgagagttttggcgtacgggcctgcggctacctggtaaagccgttgtcctatgaaaaattcgagaaaacaatagagctggcgcggctggcaaaaatccgtaacgcccgttttatccgcatggaaaaaaacaagattttgctacgggaaatcctctggtgcagccaggctggtcattatgtggaagtcctcacggagaagcgcggaaccttccggtttcgcattccctttggagagtttaccaaacagctcacgtcttacccgcagtttcttacctgctataaagggtgcattgtcaatctggaacgggtacagcggattgacgagctggattttgtgatggataccggggaacgggtgccgttctccgcccgtgaccggaagaaaatagaaagactgtttgacgagtacacgtttcagcgggaaagggaggacggactggaatgatgaagatggttgacacgatgatggtgcttttctttccgtttcttgattgtattccgttcaccctgccacggtattggctgttccgtgacaggctccgtatcccgttccgctatattgtgctgatacagattgcattggcagcagtatatagcggcgtgttttaccagatcaacctgggtggcctggaagcagcggcgcggtggacgaccatcacgcgttactgttttctgctcctttttctggcgttggctttcctgctgatcaaggacagctttccaaagctcatgtttacctggctgctgtttctggcgtggcagttctttgtgctgggaaacgcaaactttattgaaagccggttcttttgggatttttccggcctgcacccgtatctggtctataacattgcccgcgtggtgatttacctgattaccttcccgtttatgttcctgtttttcagccgcacggtggcggaagcgctcaacatcaacgacggggccatgtggcggcatttctggaagattccgctgtttcccaccttgttcggtatgctctactgctttaccgatgatgtgtacgcatatgccacctgggagtttatggtgtcccgctacctcatgctgttgggggcttgctacgtgtcctacgtagccttaaaggtgctggaaatctcgcgcagccgtacgcagcttgaggaaacattaaagtatgccgaccgaagtctgctgacacagaaaaaacagtttgacaccctcgccgcacatatggacgacacacgcagggcgcgccacgatttgcgtcagcatttgaccgtagtgcagtcctatctcgatcaagacgataaaaggggacttacggaatatattgaaatttacaggaaccgcctcccgtccgacgtcgcagagtatttctgttccaacaatgtagtaaatgccattgtcaactactatgcagcccaggcacgtgatgccggaatagagtttacggcaaaaatcatttatccaaaggagtgtccggtaacaatcacagacattaccgtgctgttggggaacctcctggaaaacgccgtggaagcctgtaaacgggatgctgcggacaggccgtttatcaagctccgtgtgaaacagcggggacagtccatgctgcttgttttaatagacaatacctgtttgacaccagtagtgttcgagaacggtacccctctgtccgccaaacgggaaggcatggggatcggtactgcctccgtccgggaaatcgccggccggtacaatggttcggtactgttcgaacaacgtgatggtgtcttttacgcctccgtacgcctcatgctgccggaagtctaaacataaacgtatcaagcaatggctgtaaatctgaaagagcgattggtaaaagataaggcataccgggtatctcacctgatatgcctcaaaattatgccgcttctgtgttccattttaccattgcctcataaaccttataaggaactttatttcgattcttcttcgcaaaatgattaataaactcttttcggtataaaagcaattgcctctctgcttcttcgcgtgtctcatatgctcctatttcctttatcttgccaagaatagttgctgaagcattaaactttccagttgttgcgcattgaacaatatttgtttcaattcccctacgctgaaaaaccgtattcgcataatgtgtaaccaaagcgcaggtatactctgcactgtatgacaatttaggcactaaaataagtctacgaatatgttttggtatgaatactcatagacttatttagatgtcgaaatattctaatttatttttgattacacttttggatgatgcactcaaacctccttgattttattaggtttttcagacctgctattgggtccgattcccgtcagcagctcgatgaaaacccattgaaatttcaagggttttttcgtttaacagtaaacttctcctgataaataaaaaccgctccgcggagaatccttacactatttttcttactctttattccatataatgaatgacagggaaagattcctgctcagattttaaagactccctctgaaagggtcggagccaggcattgcgcctggccccattgaaagaaactaaagtttagacctggaaaagtctacacttaataaacgatctaaaatcaaatatgtgacagttttttacaattatttttatttttttgcagatgaaatacagtgtcatccgtcccagacagtctttcacattcatggaaggtatctctcagagatcaaaaaagcggcaaaataatttgccgcaaataatgatgcctggagacaacgggattcgaacccgcggtctctgcgttgcgaacgcagcgctctcccagctgagctatgtccccatgtgaataattataccacagacgggaaagatttcaagctcttctatttctttttactctctttttcctatttcctgtgtccacagccatagcgcgaaatgcactcatcatccacttcagttaaattcaaatgcctgctgctcatactccatggattttttcagtttctccggcacctgtcccaacagtgctttgcagccctccattccgcccagccattcttctatctgttcctctttaataataagcggcatcctgtcatggatttttaccatcgattcatttgcctgagttgtcaggatcacaaaccgtggcactcccttctccatccggtaaacaccggcaaaatacagtgtttctttgttctccggctcaaaaacggctttttctcccgccctgttccattcatagaatccggcggcagggacaacacagcggcggtgtaaaaaactttcccggaacatcactttgtctgacaccgtctctgaacgcgcattaaaaacaagactatccgcattccctttcagggcgcgaaaaccccaatacatcatacttgcttctgttcttccatcacttccggatgcgaaaaccgctgcttcatcacagggatgtatctctgtccgcataccggatctcttatcttctgtaaaatacctgctgcacatattatctttcgtccgatttattccattctctgccttacaatctcatatgccaggactccggctgccacagatgcattcagggaatcaatatctcctttcatcggaatggaggcaatataatcgcatttctccttcacaaggcggctgactccatcaccctcactgcctattacaagaccaatcggccctttcagattcatacggtacatcagctcaccgcccatatctgcgcagacaaaccacaagcccttttcttttaactcctcgatagtggctgaaatatttgtcacctttgcgaccggtgtataattgatggccccagccgatgtcttagccactgtagacgtaagtcccacagcccgtctcttcgggataataacgccgtgtgcgcccgcctgattcgcggtccggatgattgcccccagattgtggggatcttcgataccgtccaatataaaaagaaacggcggctcccccttttctctggccagttctaatatatcttccacttccgcatacttgtatgcggcggcaaatgcaatgactccctggtgcttgcctgtctcagacaactgatccagtctctctttggccacataattaatgatcgtgtcctgttttctggcctctcttgtgattgttttcaccgggccgtcctggcagccgtccagtacaaacagcttgtctatcgttttaccggaacggaatgcctcaagtaccgcattgcggccttctattgtcaattcttcaaatctcacgtgttttctcctgctccgatgcactcctgtgcatcttcttccaattctcccagcttcttaagcccgtgtcccaaaagctccgccatccgctccatctgctccgtcaggtacaaataccccatcagagcctcaaacccggtggccatcctgtaatctttcatcgtcgcatgctttgccatcgtcaccgatttggcattgcggcctctcctgtaaacagccttctcctcttcggtcagctcttcctccagaaccttatagaaattggcctgggcttccgctttcacaagtcctgctgtctttttatgcatcttattgacctgggtattgccgtgattcatgacaaaggtccggattgccagctcataaacggcatcccccagatatgccaaggccaggggagaatattccctggcctctacttctttcagtttcattgcttctttaaaacaattcaggcacgtttccatttgacgccctctcttgtatcctccaggacaattcccatctccagaagctttccgcggatttcgtctgcaagcgcaaaattcttgtcttttctggcctgctgtctctgggctatcatatcctcaatttcactgtccagaatctcttctttcttctccgtgataattccgagtacatcgcagagcttttcgatggtctctttcagacaggacagataagcctttgacgagttttccgatgctgtcgtattgctgaatttcaccagctcaaacacagcggatatagcatctgccgtgttgaaatcgtcgtccatggaagcttcaaatttctgaacaaattccttagcggaagtaatattctctttctcgctctctgtaagctctccttctgccgcctttaacgcgtcatttaacttctcaaccgccgtgaggattctctccaagccgttcttggatgcctccatcagctccgcgctgaaattgagcgggcttctgtaatgtgcgctgagcataaagaaccgaagtacctgaaggtcatatttttcactaatctcccttacggtaaagaagttgccgagggatttggacatctttctgttgtcaatattcaggaatgcattgtgcatccagtattttgcaaaggtttttccattggatgcctcactctgcgcaatctcgttctcatggtgaggaaatacgagatcttctccgccggcgtggatatcaatggaatccccaagatatttcttcgacataacggagcactcaatatgccagccgggacggccgttgcaccatggtgactcccagtaaggttccccgtcttttttcggtttccagaggacaaagtcggtcggatcctccttgtcttcctcacccgtcactttaatttcacggaagcctgactgtaaatcttccaggttcttatgggacagcttcccgtattccttaaatgatttggtgcggaaatatacggtgccgtctttgcctgtataagcatggcccttatcaatcaaatcctgaatcatgtcaagcataccgcagatttcttccgttgcaagcggatgggtggtggccggcttcacattcatcattgccatatctttcttacactcttcaatataccgtttggaaatagtatcggcatcaacgccctcttcaatcgccttcttaataatcttatcatcgacatcggtaaagttggatacataatttacatcatatcccttatactcaaaataacgtctcaccgtgtcaaatacaatcatcggccttgcatttccgatatgaataaagttgtatacggtagggccgcatacatacatcttaaccttgccttcctccaatgggataaattcttcctttgttctggacagagtgttaaaaattttcatattatgtttctcctgttattcctcatattaataggttccggtttaaatctgtcttttgcgggtttgtcttattcctccgtcagccggttggccgaacagccggaacagcctccgcagccggcccctctcatcatttccctatcataacagtaattatctactgtcgtcaacaaggttattgcctgcgatgaaattccttcgccgtttccggtaaagcccaggccttcttccgttgtagccttgacattcacacggcttttttcaatgcccaatgccccggcaatattgtctaccatctgaggccggtattccttaagcttcggcttctgggcaatgattgtcgcatcaatattctctataatataacaattctcctccagcagctttcccacatgcctgagcagttcaatactggaaattcctttgtatgcaggatccgtatcgggaaaatgttctccgatatctccaagtgcagccgcccccagcagcgcgtccatcacggcatgcacaagcacatcggcatccgaatgccctaaaagccctttatcatatggaatctttactccgccgagaattaaatcccggccttccgtcagtctgtggacatcatatccctgtccgattctcataatgtgtatcctttctgtcatattgtgtctgattttgctatcgcagcttctgtgtcctatattatctgttgcatctgcaatatctatgacagttccgccaaaatttccggcgcctcctgccacacattatcacacattcctatactatgattctgactttccgctcaatgcaccgtatatgcaggtcactctggtacaggcagctctccccgtccacatggactgccatcggcctgtccgtatggatctgaacttcccggcactgataagtgcgaagtcctttattatgggagcgtttcagcagtgaacggcccaaaataaataaaacctgcagttttgaggcatggctcaccgcacaaacctccagcttgccgtcgctgcagtctgccttcggcgcaaacctgaagccgctgccttcaaatggatggatatgcgcagatataaaataaatataattaaattctactttcttgctgccgtcgaggagcatatacccctttgtcggtttcgccttcagatactgcttcaggccgacaagaatataattcatcttctgcatgcggatccggttaaacagtggtctcattctggaataaagcagattgtgacagacggcggcatccagaccaatgcctgcgcttacggcaaatctgcggtgttttaccacatcatctccataggtgacaacaccgtagtccataagtttatgatatttcggccgaagtaccttttttaagcatttccgcggggaacgcgggagcctgagacttcttgcaaggtcattgccggaaccggtgggaatataccccagggtaattgtattgcaaaaagaaaggccgtccagcacttcattaaccgtaccgtctccgccgacaactacaatgattctcggttcctgacagccctttgtcagctggtcggcatactcagccgcctgtcccggcctttccgtcagaaatgccctgtattccacacactccagcttcagcagtttttcaattctcttccagactttaaaaccatatccactcctggagtggggatttatgataaaataatacatcacagcctccgttgttctgtatatttttaaagcggccgccggcaggcagtagaccgcaaaaccttttatttactcactgtttttaattatatcatacttcatagcaaaaagagaagaaaatttctataaaatattgtcaaaaaagtattgacaattggaacaataaatattatactatctaagcagtcgcgattgagtgacaagcaatggggtcttagctcagctgggagagcatctgccttacaagcagagggtcataggttcgagccctataggccccattcaaaacaaaatatggcggaatagctcagttggctagagcatacggttcatacccgtagtgtcgagagttcgaatctcccttccgctactctttgattgccccggatcccttattttataaggtgtttcggggttttgttgttgaaaagctctgcctcatcctcggagccactctgatcataatatccattacttaaaacgaaatgccatccatcaaaatcacttaacaataccttgttgtcatcaatctcaaattcaatacatacacatttagtccccggttcattgtatccacagcatctaaggtcaggtttcttatgctcccaatttctagtatgccaagcccatatcgggtacttaaccccctctggttcctcgccaatgcgctgcctcatttgccgtactatccagtcataaggctccttgaaactaagcgttgcatctgcatcactgattaatacagatttttcaggatcacaatgaaatactttgtccgacactagttttgtccatacctctaccggctggattgtccataacctcataagctcaataccttttttagtttttgccttgctgttcttcgattattgcgtttatattttcgccatcctttatgattttgtgtccaacaagcatattttctatcaaacttatcctcatacgatagacttttccaaaatccttttctcatttatttccccctgtcgatatgcgttataaatattttattctttcggctcttctaaagctggttcttcgccgtctacctccagaagtcctgtctcattccatgcaaatttgtaatcaatagatttcggcaggttgtgcgggactactgttttactcttaaaccatggagatttgatacagtcttcctggttatcatttgtgggtatagcatcttttgacatatttaatcctcctgacattattcgcttcttctgaaaacagcatttcattcttacaccaaacacctctggggcgtgtaaactcgcttgcaaaacgccgaatatattcattctcgtccaatgcccactctgcttctcgtcctcccattataataagttgtttttcttatatcataatactaaaattaattaatcttttctacataagcatacacgtctgcgtttaatatatcccatttcgttttatatttcttttccaaaacacctcagaacattatttatattattttaccacgtcagacaataatctactatatatttctctctttaatgaggcggtcatctttccttctgacagcagtaagaggagatttaatgagcaactatattcccggtaaccagaaacattttccccttgatgaccgtatctacattgaaaactctctgaataaaggatattccttcaaggtcattgccaaatacctgtgtaaaaatccgactcaatgggatgtgaatatgattgtgaaccatatcaactccactcccaggaatagtctggatgtaaaacaccttatgactctgcgttggaatcattcggtgaaaacaccgtgaaagcacttcagcttaagcgtgtttcacccgatgaggttaatctgacgcctaagctgagccgcttcaatcacgaactaacttataaaaatctgctgtcggactggaagtaaacttttcacattttttgaatgtggctggtggaatttagtcccgcactggaatttactctaactcaattcccaaattaacacctctattacatatataaaaagttgctaccgtccagcagtagcaccactatcgattaaaattttatctgcatcttttagttttattttccacgacaaacagttcacgccagttattgcaaggagcgcaaactcgtacgaaatcatcgacagaacatggaatagttgttgatactgtgtaagagctaccacaatattgcacacgaattttataggcagagataatttctgttacccttgccgtaaatgttttatctgatctctcattcttcttaatcatttcgtaaatttgtactgttactttatctgctaatttagtagccaattgtgaatagttcattgtttccgcctttctcttacttggttcaccgtatatctcgcttcttttaacgtttggaaagactctggcgtaatgccccttcaaattcccgggaaagcgtatcaaccagtttctgggtattatctacactattcaagttgatatcacccatattaaaattgaatgttcttagcctatcaactgaatctgacgcaaagacaaattgtggtggcgtcggtaatgaaaccggaatattttcgaaattgcttataagcatgtgttgctgcttttcattaagtacaacctcacccggatgagcaattataggaactgcattgtcaacgtgattacccgtcataagagctttgagctttttaacaacatcggagtcttccttctgtatcgcaccattttcaatgccatctttataggccggaagagatttcttttgtttttccctctcctcaatctctttagctgggccagtggcaggtccatccggggtattccagttggggccttttgaagaagagtggcctttcccacctccgccacttgacgatggtttagaattgcttaccttttttgcttcttcctcggccagcttctttaatgtagcaagctgttcctctaaggtctttttgatttcctcccacgtagaagtgtactttgaaattgtttcgctgtttgtattagcaaccttcagatactccttaaaatcattataggaaccggacatctggttctgaatgttttccagtgcagataccgtatctttattaccggttgagtttaatatcgcatcaaggtattcctgagatgaaaatccatcctttgcagcgagaattaattcgtcgaatttagatagaacgtcctgatagctcatggaaccatcctggaatgcggcaatgtactgctccataagagacgataccttttcagtcgcatcaatctgtttctggtacatttccttctgtgcttctaccgtctcataattcttcaccattgcatcaaagatatctttgtcttcgccggtcgtgactttgatttcccaaccagagccgaaaatttcggatgcgagagcagcctcattcgctttccggatattatcggctatttccgaccatctgtctttaacttcacctagtttgtcgatctgttcgtcgtagctttccaacagggcatcccgttcttcttccaaggatttaatctgttgttccagctcatacttcgctttgttatatagtgcatcttcgtgtgctttattggcattcctgacagcatcgatatcttcccggtaaacaatttcgccattctctacaacctgtgttgttttctggtttttagcccgttccaggccgtacaggctttgctcgactcccaactggatttgacgtgcctcattggttttatttaataaatccaattcatcctgtaatggtttaatccttgattcataggatttttctgccgcctctgtcatgtcattatatttatcgatttctttttcgatcgtatttatgacagcagagatggtcgtgtcgtaatcgcttgtaacaccatccaatgcaccttttatattcgatagctggtcttttaaatcattgagtttgttaaggggatatccaagatttgcttgttatactggatttgctcctgaatgagagaggacatttcattttcacagtcctgaatactcttttgaacttcattaaacttgtcgctgccataatcataattagacagctttttaaccagttcttcgtgttcttctttcagcttatcaatttgcttagaggataattcaattagtttttgtaattgctcctgtgaaatatctttccccaggctggattgctcatcgatgaaattgctgaggtcttgcttgataaatccaagcagctccaaataccgctcaattctccggacagggagattcaggatttcttcattccatttcgcctgattttcttcgcattgccttatggcgtctttacagcttgatatctgagacttgacattgtaccattcggcgcttccttcgtccaattcgcttaaatattcctctaaagcgtcaatctgctcatactgtaagtctatctggtcatctgcgagattaatcatatcccggtagtcagactctgtaataatacggcctgtcatttctttcaggtttatttctgactcgatttgactcatctcgtcttttaattcttccagagattccttaataatattaacccggatttcaaactgctttttaatatcctcggagtgttcttttactttgtctttgtatttttcatcctgctctatgtaggttttccaatattccgaaccatcctccaagagctttatcttagcagccatggctttatcgtcgggatcataactgaactcgtctttccactcttcaggagaggtattccccatcatgatttttccaatcagtgcattcccttcagtctcgccaaatgcctcaatgattttctgacggattgcttcccactggctcaggtagatatcaagtgcttctttgtttacccgtattacttcctcatcgttggcaagcaattcgttcataagggagagctgtttctcatatgctgtattctcgtcatctatgatatctgccacttcttgacgtttacgttcagcgtattctaaagctgttggaatccagtctaggattttcttttcatcctcttttgcttttttggaaccgccgccaccgcctgatttgcctgttttagtaccgccgccatattcaggagttgatttagccatatcttcaagcttctgagcgctatctttaaaggcttcggcctgagtggattccagttgtgttttccaatcatcaaccgataactcccctccccaaccatgtggagttgctaccgacttaccggaagctatgtctgccaattgcatcttagctgcataatatcttttccatgcatccgccgccaatcctaatgccttacaaacctgcgctaatgcattaatatccccggtagtatttattacttcgtccagagctttctgagcaatgtaggagaaaaaggcatcctgagcatttccaacgactccaatttcttctgcaagtgaataaatctcgtcccgtgttttgtttgataagtcttccgttgcccatgccgcttccgcttttttaattgcaagtgcatttgttactacctctgctgcatttgttacgcccatgttttcaagcattgccgcagtagtatcataggtttcatctgaaatgtttttcagaacctcttcagactgaatccacgcccgagcaattcattaaaagcactctgacaagcagcgatatcctttggtgactcggatatttgggaaatgaaatcggtgtaagcctccctaaaccggaaaaattctctttaaacttattatcgtccaatagggagaagtcgaatttaccttttcccttaatggatgccatgattttatccagtgactcaaatccctcagacaggctgttcacgttactaatcattgtttccagtgaatcgtatttcacctctcctgaatcagaaaaagtctctttttggatatatccgagctgctctaaaatcgagatgacatcttcaagttccagattatactcttttgccccctgtataagctgtacaaatggatcatcagcatcgtccacatcatagattgcttttaactcggtagccgtcttatcggctattttagaaatttctttgttaaattctcctgattgtaactgggaaacaaacttatatttatcaatattggaattgtcaaaaatcttatcggtgattggtgaaaacatattccaactatcatcagcctgaatttgttgcttcaattcctgatacttgtcataggccgcttttacatcgtcgtcagtaaaaggatttttagactttgcaacagtatcattgtattcttcgactgatttaatgagatcttcaaatacaggagacttgcttgggtcaatggcaagttgtgccatgagtatttgttcgtactgctcaccatatttttcaactgttttctgcgcatccattaaagactttgacgatattttcaatgtactatcaaagacatgttcgtttcccggcttttttgccagttcatgaacttcgtccataaattgattaatggtcttttttgcctctgtaggatttgcaacaagctttatttcaaattctccggttttattacctagttcatcataaacatcattagtaagaagtccctgttctcgatacttctctgcgatctgaagtaaagctgcatctgcttcgttggatttgctaagggttcctcttatgagagagtattcctctttaccctccatttgctgtttggcatattcatttccctctatgttttcattgagaaattgttgtgccaacgcttttttattttcctttaatgcagtagtctgatctcgataagcatcagttacaagatcaattttaccgcaagcatctccatatttatcattcagatctgtttgaatacctaaaagttctctcttgatttcgtattggcgttcttctgttgtgttagaatttgttaattcggaatgaagcttctggtactttgaaacataatcatctatcgattttgttgactgggaaaatacttgtgctgccgtatgggattcttgacgcaatttttcatgagactggactaacttcataatccctgtcattgccgcctggatagcaaaacttactccaaacgtcatagctgatgtcattaaaacagtttttaaccttaatgcatccgtttgaataccggcagctctaagagaagcttgataaccagttaaagatgctgttccgtccgtacacgtggataagtatgcttttagttgcgcactatttttaacaactgcatcgccaagatcgtttatatctactgcgccttcagcaactttcgcattccattttgctatagcaattttcgcttcttcaaaatgctttttctgagctttaatgttagtaatattaatccccatgatatttccctgaagatccattttgccgctttcaggattaaatatctgagtaattccataatctttattaagtgcagtgtaagctcctgtaatggtagttaatagtgttggaattgcgcctaatgtatcaaccaatgtttccgctccaccgattaaggaatcaagcgcagatataccgccctttatcatattttggcttgtaatatgatttacaaaagaatcccactgattctgcaatgcattgagacggccttcccatgagtcagccgtttttgctgcctcagccagagaagaacctgtaccctgcgaaaattcgccaagcattttttcatagagatcccaccggctcaggagtgcagaaagtgcgttagcatggtactttccccccaggtcagaaataagtccctgcttgtctgcactactatccggtaagctattatacacttgtgcaagttcttttaagacttccataggattacgcaattttgcgccttcagccgtcattgtttcaagctctacgcctaagctgtggcacctatcttctaccttctttaatgattcctcatcaataatctctccatcaaattcgcctgacaccttctgcaaatttaacaggatggaacggaaggcacgtcccatttcagagcctgaccgtttggttgtagcaatcatagtagcctcggccgctgttaactcatcaatttccactccggcctctgctgcatatgaggcgcttacccgtacaccatcagcaatatctgtgagcgtagcagaattacgattgctgatatagttcgcaccgtctaatgcttcagtaagcttttcaatactacctttatatttgtatgccgcatctgttgccagaaggtagttgttggcactgtccgctgtcatatcaccagcagattgtgcgagtactgataattcaccaagttcttttgacatcgaatcatatccagaacgtgccatttcacgtacgccctctaagtagccactagaacgtgacccatactttgaagcaatagcaaaagaattatttccaatctctgcaatctgtttagcagtcatttcagatgttttagcaatctcagtgagtattgtcgaattgctttttaaagtattcaatgatttagaaaattgccgaactgccatggctccgataccaaataagcttccaatctgaccaatcttagacatcatatctttaagcttatccgtcgtagacaatccaacatatcccgtcgcctgtacttcggatttaaacagtctaaagctatccgttgcttctatagcagttcttttgtcattaatgttgtcgaacaatgttctcaggttatctgattctttaagtagcactgatgactctctgattttactgtttttactcaggaaagttgttagatcgttatgaagtttattctttttgaacgaataattaagtgagacaggtgttttagaaacagcagaatgaacattggaaagtgctttttgtactttgagctttagtccttgttcattgattttaatgtcactaaacgaaatattttttaatgcatcattaacagctcttttagctgttctttcgtccaattttgctttcaacttaattggggtaagctgtgactggattgaatctacagcctgtttgatttgactcttgctgtcaccctttaataaggtagccgtcagccgtaatttattcagagtcttctctaattgttttagttctgtattcacttgtctttttgacgatttgatgtttaatgccgctatcaattcgaccataaaattattattggacatttaattcctcccttttgtgcatattaaaagagagacttttgcctctctctaagtatttcaatctaattgttcttgaaccgcaaccaagctaaagacttgcttgcttcttgttcttaaaactctctcttacaacggttacatacccgttttatttttcctgaacctaaaaagcctgtaaatagactatagcctttattaagtaaggtgtattctgtgctaaaacagtaaggacagcgtattacaggttcttccgctgccggggcaaatgcgtctgggatgtaggtgcgtagaatttctttcgctttatctgagccatttgcatctctcggtggtgctttaaattctttcaccacttcaaagtattcaggatgtacaggctgcctatcccacaagctataatcatcatcaaatcgtttatcctttaaataccaccacgtaatccaatcggaatgctcatcctctttttcagttactagctttccaccgcatacaggacaggtttccacatttccttgtttaccaagtaaaaacattttattaaaacttgagccgcactgttcacattttatatcgttattttccatttttagtttcccctcctttgttttaaaattcgctcccacaattatcacaatgccattcttttccacctgctaaaacatatacccacaacttttacatttgaacattttacttgtatatggtaatgcgaaaactcctactgtcattcctgccgctatttttgatgaggtcttaattttttctaactggggagagccacaaatcggacagcgaggaatattgttcactgttgggtctacgggccttgctttataaagtatcttccttccttcgtgtactttaccgcattttctacaagataatgtaacaccatcctttaagataacgtattcaccgtctactatatcgtcgaatttatctaattctaatgatcgtcctccacgggtaccacaatcagtacaccaaaaactcacatggctcaaatcaggttcttcatcatagactgttacttcgttaaaatacatcatactctctcacctcctagaacatataaccacaacttttgcatttgaacgttttacttgtatatggtaacgcgaagactcctaattgttcttaaaactctctcttacaacggttacatacccgttttatttttcctgaacctaaaaagcctgtaaatagactatagcctttattaagtaaggtgtattctgtgctaaaacagtaaggacagcgtatttggggttcttccgctgccggggcaaatgcgtctgggatgtaggtgcgtagaattcgcttcacttcatctaatccacccggattactttcaggcggtgctttaaattctttaataagaaagtacgtgtctccaaaccgtattaaatctatcggcttgtctctcaaggaagttgttttcccattatcctctttaaaaccataataccaccacgtaatccaatcggaatgctcatctagtttatctttcccacccttttcatctccactcaaattcgcaccacagaccaggcaagtattttcactattcttagattttaagatgtcttcgtcaaatactgtattgcattcaggacacataattcttcttcccatactcttacctcctagaacatatacagcagcctacacgcacactgtctctttacccaaattataccatcttgccccggcagagtaaagacgaatcgaacgtgttttctctttgtttctgtagaatctttttcgtaagatttacttttggcttgccgttagatagtcttccagcctcttcgccagatggggatataattcgattttacctgctttaaaacgcgataagacacatgcgccaacctttaattgctcgctaatataggtctgcttttctcgtttaagtctctccttatatatctctcttaatttctcctgtgtcattctgttttcctccttttaaattacaactatttttgtaaattttattgatatcagacggaacaaaaaatgtctgagatcattttacatgctactatattttcgtactgccagcgtgcctcgtttggaaagacacgctggcttaaatgatgagaattacttagcttacgttcctttcattcctatcttcataggtagattttaaaaacctttgtaaatcaaggtttttaggagtttagcgtggactttttttccgtttttttaaaatactgcaaaaatatattttggtctttatcaaataaaaccgttaagagattatcacgtattttagcattctccctttcgaaagcatattggataagcgagtgcatgacatttctcttaatcgtcatattcttcagcttcatcatacatgcattaaattccctctcacgaacattctgataatccttttgctctctgtttacagaaccaactaccttcgaataatcgttaacaattgaaataaccttttggcgttgttttctatcgacattttcgatatccaccgcatctgcaaccaacgtccctagagatgttgtttcttcaatcaaatttttattttttcttaaatcaattacctctttatcaataattcgatatataatatccataggacaattgaaatctccaatatcagaatccaacatttcaactctccttctttttgaatattttgctttaagtttttgaactcccgcataaaatctcggatattgtggtttgtgcttcatacatgcgaaatgactgatttttgataattccggttctacctctatttcaaaattgcgtttagcagaatcaatcgccacctgtgccaatacagaacaaattataaatatatcttctatttcacggtcgttgcctccaccatcgtagtaataactcaatgctaactgagctatgttactagcatatccgaccgcatattgagaagcggatatcgcattatccatcttagcatatgactccatgcttttattatagctgctaatatccacacttttgattccattgattatggtgggatattctttgtaagccttcctcgccagttcaactatctgcttttgattagtggcatatattgcatcagtatccagatcctgaccatttaaacgactttgcacatccgtgccaataccattaataacaatgacattttttcctaatttggggaaatatttttgtatggatggaggataaacattaataagatggactatattatttggtgaattatgtggactgcgaaaacccgcaatcctctcgccctcattaaatctgggcgtataacattggattccatcctctatagattcaaagcattcctcttgcaaaaaatcctttccaacaactttcattagcagagaaacaagattgccacatatcgtcagattgtccccatactgtaataattttcccaattgaaggcgctcttttttaaatcgactaatgatatctacctttttatcattaaagtattttgtacgtttaaagtcttcattccagtcatctagcgccaacaatacattattaaagctgtattttgatgttcctgtaattttcaagtgttccctaaaagcattatggtccagcttcaaattactacaataatcaatacttactttcgcaacctcttttaaaatatcttcatcagtagtcggcaagctaccattcatctgataagaacttctttgtaattccccccatttactactgtgtcccgtttttactatagcgaacctctccccatgtttcttcataaatttattataatacataaaggccgactcacaggttcctcccatcaaatcaacgaatttcatcgttttctgttataacaacctttatatctgagacttttatctcacgtcctaacatatcagttacaacggcatggtcaaatttgtcgccgtaataatctttaaagtattgctgtatgttccccctgaagagacaggatttgaagaagtgacttctacaatagataaagccatccatatcatccggaaatatcgaatcgtcaatcagtcccatgccatcccataatgtattaacaattgctgattcctcgtctttgcgctcaacataacaccgttctacatactcaatttcttcttttacagggcattcttcaatttctatacctttctcaatcaaagcagcttttgtttttcggatttgttttaaattggggtcgttcttttgcttcatcttataaaacgtaaggttaaactggttaatatagctttcagtctcgctataatccaatttctgcttaatttcttgcactttttcaactttcacagtcagagcctgtttcatggtggaaaccgattcgtcctttgctacaaaaatattagctaaagggattgaaatatagtctattgctgtagcagtaattaaagtgctgtatgccgatagccctactatattggcattattaaacggcattttatcatataatttcatggtaatataatcgagagcctttttatgtaatttttcacagataaatatacatgctccttctttggctttacctgtgctgcgcatgagcattttataatgaatttgctttgtcttcccttctattatattgccttctttatcataagactcccatgtaacagttgcaccattctcgtaaaaataatgccgtaattcgttttctgtcatcttaggaatattttcatcccctttgattccgaaatcaaatttcataataataaaatcataactatagtttctcgtgtttactgttactccgtgctttcgcatgtattccgcaaataagctgttattaatcattgcgttcccggcacctaaaaacgcatcttgatctccattatttttcctaagcagattattcgcttgaatacttttaattcttatagctgtgtctttatttcctttatcgttttttattttaaccaccctctctttttatatttctactaagtatttctctctttatattttgattttgttgaaaaatcgttaccagaccggcaacgttatgtattgcttttatttgcgttttatacttctattccatgttttgggcaaaaaaataccagccatcgttattctgatagctggtttccattattaaatgctttaaatagtccttgttgtatctacaagtagccttgataatttttcttcggacgccggcacggccggcgctggcgccattaccgcaggaagcggcgatatcctataagcgatattataaaccacacaagactcatcagaaccgtaatttgtcctattttggtggttattgactctataaaacaaaatatcagtacagcgagagtcaatatccgtaatattttttctcccggaactctccattcacttccatctccatatttatcacagaatttcgagcaggacaccgcaatcatactccacatcacgcagaagcagaatcctgaaaagaaaaagagatacttatataccgcctcccccagccaggccgtttggaccacgcaaagaagaagcaggcctcttatgaaccaattgatcatcttttttcgattttctatggaagtatcaccgtgacgtgtactgttctgcacattgatgagctggttttttagcatctgcgttgtcgggagcatacttgtaatggttagggcgctgcccgacagaaatataataactcgaaagcattcaacaataatcggattgcacccgatcagcttaagggctctgataaaaatactaacatccgattcagttcctattgtcataattccggccagaatgggcactgatattacattaattacaattgcacgaaatacaatcttaagtgtttctgtagcaattttttcactgcttttcttcgtattgtaaagtaaaaatccgatactttcaattcctccataaatcataattgaaccataaatcgcgcatgccgaggacgcgatcgagcctctggcaaggccgctgaaattgatgggccatggaacctctgtcgtgtagaatacgcctttaaataaatgacagactgcaaacaatcctataaaacagaacaccatgattgccagtattttaaaaaatgccgtataaaagttaaaaatttcatgtttcccaaacatagaatcgattgcaaatattacaatacagagcatcaggcataccggaaataacggcagccattcaaatatttcacatagtatcatccctgctgcgataatttcagaggccggaccaaccaccatagcccctatataggcagaaacagcaaaatgccctgcagccggcccataaatatccagcatgatctgtgcgtaattccagtctggggcccggccagattcatttccattaaaaacaaactgacaatacctgccagaattcctgtcaaaataataagcggaaccatatggattccaatcatgtcataaataacagtcaaaccgcagaataaacccgctccaagaatactcccaattgatataattacaatatgtccgcttgcgttttgaccgccgttctgctccgcatatgaaaatcgccccattatactcctctcctgacacaaatttcactgccgcccgaagctacaacaggttaaaaacccaattgtttcctcggcccagctatattctgccatataattttcattgaacttgcagggactctcatcgttcttttcaagccactgatagaagtcacactcaaaggttcctacatcgacggccctgcaattaggatgctctatcagaatctccccgattccgtactgtgacagcgtatcccggagatcctttacgactctgcggaacttactttggtattttttatcatttgtagcttcctcccacaatatatcaatcgcctgttcattatttacagagttcccctgtcgatcaaccagataagccagcagttcctttgattttttatttgcaaaatagaccagctgttctcccgcatacacatcaaaatatccgaatgtacgtataaatgttgtttttattttactttttttaattaaccgggccgtctccaatgcataggccagatcttcatagctgtatggtttttccagataaaccggggcatggatctgataggcatccatcgcatactgcgtatgggcggtaataaaaatgagaataatatccttcctgcgttttcgaagttcctttcccaattcgatcccattcatctcaggcatctctatatccagtattgccatatccacatcatgctcctctgcatatgcaatcgctttgacaggagattcaaactttgcgattatccttatatcttcaaacctggcacattccagttcgaataaacgcattgctaatatttcatcgtcaaccagtatcgttttaatctccatgatgttgtcctttctttggaattgaaattctcacaaacgttccttggcccggtacggaatgaataaagaaagcagcattacagtagtattccaaacgtcgctctatgttgcaaataccgatgccgctgtgtccgtcaggactctctccttcaggaccctccgatgcaaatcccacaccgttgtcctcaatctctacataccaaaaattatcatcctgagatgtgcgcagtcttacggtacctccttccacccgtttcagtacaccatgcttaatggcattctccatcaatggctgtattgtcaaagacggcacataaaaatcctgagtctcgacctgatattccacatttaatttaggaaaacatgttttctcaatattgacataaaattgaaggtgctcatattcctggctgaaatgaatcatcgttttatcaagtgcattcatattagcctttagaaaacgcgaaaaatcataaaccatataatctgcctgttccggctgaatccggatgagcgtacgaatcgaattcaatgtattataaagaaaatgcggtttaatctgacttaataaaagagaaaccttactttgattgatctcctctttaagccgttccaaagtcttaatctggttaaaaatttctgcgaaaaaaacagccaccgcaaaatatgcactgatcaagaacagccagtacagccttcgggaggccaggtttaaagccactacgcacccatataatgcaattgccgttttgatggtttttaataagctggagtgaagaaccactttgttatgatcaaaacgagagataatctttgtctcaaagaagccaaaggccccgatatacagaaaaaacacgcacatatacagaatactccacacagccatatcggataaggtacactgcccaaaaactgtcaggccaacggccaacacaaaatagattcgataaataaagttaaaaccctgatattccctgtaaaaaatatttgggtaacttatcacttcgcaggccattaataaaaattggggaagcagcaacaaaagaaaattttccagaaaataccaaacgggagaaagtccgataatcatatcaaaaaaatgagtacgcaaaatacagaggacggaaaacatcacgacaaaccagcttatatagctgacgctataactttcccgggctgttttataatatattttgtttagcagaagaccgacaaaacccgctaaaaacataagaatcccaagaataagctcagcagctattcttccggtaactgtgcgggaaaccatatttacagaggtaagcacaatatctttaacctgcccaaaaaggattgtgttttgattgcacagtcctaattccaaacggacatctcctgataaatgccctaaagagataatttcatatctgttctgttttccctgattttgatagaaatttctcagttgtccatttacccgtaccgatatcttttgaccttcctgataaaatcccagggacatgtcttcctcaggattcgcattaaatctggcaataaaacgatagctgtctccactacccgttgggattttgcatggaaagcccaccggtgtctccttttctccattacacaaaatccattgtatgggttctgattccttcgataatgtctgccgaaagctgccggacatttcagaaataactaagatcagcattagaaggagtgtgacggcaagccaggctatattccattttctcctgctgtactccatagctgttcctttctgtattgttttgctcacagtataacacatattgcttattctttcaaaaaattcgcaactgccgggacggtataaaaccgccccggtacgcaacagtctttatcagatagagctttttacagaattcgtttcctcatcgtaaacccactccctgtttgcagaaattcctgcgaaactttcctgttcctgcgacagttccttttgaggatattttttaagaacccaaagtttcatcagaacatagtagcaaatccccgaaacaaccgagcctgcgataaaagcaaccgaagaaaacagcatacatgctcccagtcccactataaacgaaataattcctgccggattaattccatttgcataaaaatactgtcctccatcctccctgtatagatccggaacgttcaatcgtctttttctaatcaggaagaaatcaacaattgtcataccgtatatcgtagaccagagagaaccggtaattgtcagaaaaattccgatatgatccacaagtacccacggctgaatcaccgcacctataaaaccgcagatacacacccccagccaatatggaatccgggaacggaacagagctacaatgcagactccgcttggcatcagattacatacagcattggtagaccactgcgccataatgatcatgacaagcagcagcaccagtataacaggattattcgtcaccgcactgattgcttcaatgggattaaaatttccggttgttaaggtcgataatgcacccaaaaagatcatgaagcctgatgcaagcggaagcgcaattatgtaaccgggtatcgcacgtttattacgtttcagcaattttttctctcctttgtctgttttaacatagcgggaccaggtttctacctcacaggcattatcggcccaataatttaacgccagcatcattacgtacaagatcatgtttgcgtttcctttggcaatatgagcgccaagctcgtctgaatagacggagttccatgcatcaattccatttgcactggctaatccaaaaagacgtattaccatataaataccaatcagcataattgtcggagctgcaatattggccaccttttccatggcactgaagccgcaggccgtatttatgacctgaataatgacgaatacaataaaccataaaagccaattgtcatagcccgtaaagatgactacaatctggttaattgcagtggccccgaagtaagattgaactccaaaccagataggtccgtatattgtccgcagggcattgggcagcgctgttccccgttttcccaaaaccgccccgacatatacaggaaaggacaggccatgctccactcctatatcactggacacacagaaaaaacatccgagaacaaatgtgccaacgattgccgcaagggcaatttgcttcagattacaatagtaagccgcctctcccccacagcgaaggtagcaataatgatgccaattccgatccatacattaaagtaacccaatcccccggtattttttccggataaagtaaccggtaataaatcagatgaaatctttgctgcttttttcttattatcattactcataaaagtgcttcctccctttgtattttgaaactgctcatcttatttgcagaacttaattaattcgtactttaaaaaacggcaggttttaaggtccatgtctgtaatactgtctgctcaataatattctctgccctaaaatcttccttccacagatcccatcctccgccgaattctatatcgcggtttacataatcagctgccgcaaggcgtccgctttgaacctctaattgagaaactccctccgacacggcctttgacaatgttgcaaatgcatcgaccggattgataaaattatcccctacccgataaagtgactgaagctgcttatatccgaaaatccgtttggtatcactgaatattgcctctgccagttcttttgccgaaacaggggaagtaagaaccgatgtctcctcacgctccggtccatagataagctccggcaaaaatgcacggcctgtcaggtaacgggccatcagattaagtatctccgatgctgaagaccattcgccatgaaaatcaaaaaatccggcttctccgcctaaactgcgggcggccatgcggacatcctctgctgtaataggttcgaaacgatgctgttcataagccatggattgctgcaccgtaacaaattcaatttcatcatgcgcgttcacgtactggaaaaaggtgcggtattgttccagaagccgctcaaactcgccatcttctcttaatggagcaggctgcaaatatgccggatttttcccgtaagcaaaatttgcagaatcccagaatttagtacaaaccagttcatggggatgatcatacatacttaaaaacaccacctcatgacaatcattttcatccatcaactccaccgactgtatcagggaacattcttttttctctttatctaaatgagccaggttatttaattttgtatagcacagtacaccgccaaaccagaatggctgtccataaacacgtaagatatcatggatatcaagatatgtaggaatcccccatttgcgaagagccgggaaaacctgaggagcccatgcaacaccaggatgaccatatgatgtcaggttttgaccggtaagactctttaacctcgcaaagccctgcccttcccgacgctcaaattccaaagcccctgagcaaatcccattctgtctaaatattccgatggaattgggtgtacgctatggtttgtcatatgaaacgccagttcatggtcagccagcagttctaaaatatcagttcttccgttatgtatcaactgctcatatttttttgtacacaacttcagagtcgcccggacgccatactcgtgcatcagttccaacagctttaatagtgcattctccgcctcttcggtaacataatcttccacatcgtaccacaaaaggattttctttttcttcatcattttttctccttcataattagatgtctgcttcattacgttattataataaatcgctcagtgtgcaaaaatcgtgcaatcataaccaccggctgaagcgcacagcaggtggttttatttttccaaagttctgtttttcaaacataaaagacttcactatgaaaacaggcccttggcctgacaacaaaaatgcacaggttttgcacgcacgtttcactatactttaaataaaagtgaaccagagtctgtcttaatattgctttcaatataccgcgaagtggggcgtgcagatggcagaaataaattttaagacaggctctagcaataacaggaggtgtttatgtatccaagcatcacgttgaaccgggagcgactgcgtcaaaatgtccgcgttatgacatccttatgccgtaaacatggcatcgggataaccggtgtaaccaaaggtttctgcgctgatccctctgttgcacaaatatttttcgaagaaggaataaccagatttggagattccagacttttaaacctgaaaggattaaagggttttgaagtagaaaagtggctgattcgtcctcccatgtgctgtgagacagaaaatgtaatcacttacgctgatgtatctgtcaattcagaatatgacaccattcttcgtctcaatcattatgcccaaattcacgacaagccgcataaggttattttaatggctgaccttggcgatatccgagagggattcacggactatcaggaactttttgaggtggctcgggccgtggaatcactggattatattgagctttatggcattggcacaaatctgacctgtttttcctttattcaacccactttccggaagatggcacagctctccgaactggcggaacagattgaagaacggattggaaggcagcttgagatagtcagcggaggaaactccgctactcttgacttgatgattcatggcggcattccgcctaaaatcaataacttgcgtttgggagaatcgcttcttttcggaagagaacgggccaattaccaatatctccctgatacgtttcatgatgcttttgttcttcatgctcagattatagaattaaaatataagccttccctgccttggggaacggtcggagtcgattcatatggcattcgcccgtccttcactgatcgtggagaaaaacggttgaaggcaatctgcgcaatcggtaagcaggattttgatctcgaaactacggtaccagtcgattctggtattcttatgctgggatacagctcagatcatttgatacttgatataacagactcgatacattcctaccatttaggtgacatcatcgatctgattcccggatatttttctcttatgcgtgcatttacctcaaaatatattcaaaaatctttttaagaaaggaagaaataccatgaaagtaaacgatcgctactgctccttctactatgagaatgacgatgactacggcacaatcgaaattgagccggaaaaaaccgccctgcttattattgacgccgaatatgcctgcgtcaagcgtccccaacctgaaaacccgagccccgcagagcttgaaaacatagcccgttgggaaccgttctatgaaaagtatgataaggtgattatccctaatcttcagcgtctcatttctctgtgccgccgcaccggcatagaagtaatctatgccaagattcaaggctttaaaagcaacggccgtgaccgctccttagatcaaaaggtttccggtttcaatcagttcctggttacttccggtgatcatcgcggagatatcattcaggaaattgctcctcaaaaagaggatatcgtagtcaccaaaactaccgacagcgccttaaccggtacaaaccttcggctcattcttcataatatggggatcgatacggttatcgttaccggaaccatgactgaccagtgtgtctccggtacagtacgtgatttagcggatgaaagctttaaggtctggctgattgaagacgcctgccttgcagcaacaaaacgcctgcatgaaacagaacttgaaattctaaacaacatttattgccatgttattacaactcaggagttgatagatgttgttaatcagacccgatgatgatgcttcacaaccgtgccggtgctttaactcactattctttgcctctatttataacgctcttttgacttttcctaaagttcattaaaagcatctttaaggccatgaagttttcctctgtttcatggcctttctatatcagcaaggcagttgcgttcctgcccttcacttctccaaaattgcgtatgcggtttacgatttaatatgtatattgattaaaacttttacataggtattaaaaaccctgattataaaggaaacttcgtaatttaagtattttacgcaataaattaagctttgcttacttcctcaattgatctatactataaataaggccttttaaaccatgatgaatgtactttaataaaaataggggtataataaatgaacatagaaaatgtctccaatcgtttttgtactgaaatcatttctagcccttatagtataagttttttacaatttttttaacagcttattataatttaccatttaccatatttaaagctccaatctgttataccttcttttccgtgtaaacttaatcacctcttttcgttttaacaattttttcttttccttatctaagtctgattttttctataatagccgtaataatgattcagactcctgtgcttgtcatgctccgttcacgtctatgaaatgcacaaaattatgtgtatatccaattgacatttcacacagaattattcatatatttgcatgaaaatatatgcattctgcactaatcattcacatttttatgtttataacgttcatatcaacaatcaatgcagtaccttgaaaatttaatagactttacattctggcatatgatatacttaatcataaaagattgggcggaaagtacgaggaggtaaagaggatgacagatagagagttattgcagtctatatctgatataataattggtaaaatcggagccatcacggacaatatggctaccaaggaggatctctccaacatggccactaagaaggatatctctaacatggctaccaaggaagatctatccaatatggccaccaaagaggatatctttaatatggccacaaaggaggatctctccaacatggccactaaggaggatctctctaacatggctaccaaggaggatctctccaacatggccactaagaaggatatctctaacatggctaccaaggaagatctatcctatatggccaccaaagaggatatctctaatatggccactaaggaggatatctccagtatggccaccaaggaggatctctctaacatggctaccaaggaggatatctccaacatggccactaaggaggatctctccagtatggctaccaaggaggatatctctaatatggccactaaggaggatctctccaacatggctaccaaggaggatatctccaacatggccactaaggaggatatctccaacagatggctaccaaggaggatatctccaacatggccactaaggaggatatctccagtatggctaccaaggaggatatctccaacatggccaccaaggaggatatctccaacatggccactaaggaagatctctccaacatggccactaaggaagatctctccaacatggccactaaggaagatctctccaacatggctaccaaggaggatatctccaacatggctactaaggaggatatctccaacatggccaccaaggaggatatctccaacatggctactaaggaggatatctccagtatggccaccaaggaagatatctccaacatggccaccaaggaggatatctccaacatggccactaaggaggatatctccagtatggccaccaaggaggatatctccaacatggctactaaggaggatatctccaacatcagggcagaaattagagaaaattcaaaccttatcttaagtgcattcgatcagactgaacaaaaaatgtacgcacgtttcgataaggttaatgaagacatggcaaagatgcgcgaggatattcacacaacaagatacagtaatgaagcagttgagttgatattaaagaaaacagcggatcttgaagaacgcgttaataaactagagaatcttcaaaagatatcataaaaatattgctaaagaattgtattaccattagttaaataccaccgtcagagtgtaaagcctattaagttttcaggggcttacactcttttttatttaacaggaaaaatttcctgttaaataaaaaaccgctccgcggaggagcgcactgcggcagtagggaataatgtcgctatagcgacccgccgcaggcggagaatctcgcttgcgagattcgttcttgtttaacaggaaaaatttcctgttaaataaaaaaccgctccgcggaggagcgcaactctaaagaggaagtctgtgagtatgcagaccaaaacataattttaggcttttttcatgccgaacctgtcacacagagaagtttacatggagtggcataaagctgctccacggcggttctggggcatctcagggggcactgtggaggttttcagaagccagatttgaaacgacgttttcatgcgaacaggaatgaaccggtctttgacccagcccctggcggatacttctgcatcggcaccaacaccggaatgtaagcaggatggcagctaaccgacggaacatggcactatttcaccccggtgtccgacagaaagaaggggattatgctcacagatgcctgaatagatcgtttaatccttatagaaactgcattaatctcacgcttgaaacgtaccggaccatacttaaactccgcaagctgctctcccgctctccaatacaattctggcctcagggaattcctgacagaatttttcaaattcttcttccgttgtttcctcccgaatctcattataaaactcatagtctgatttatttaaaaagtcagctatctttttcacttcttccttgttccgtataacaaaactgctctttaaattctcataaagttcctcataatctctcggctccatttgctgctaccctttctttttacaacaacagttgaataaatacctttgtaaaatcttttgtcccccaatatatatgcttcgtcacatgtatattattagccattttaggccaatatagactaaaagtcaatagaccaatatagtctatttataataagctcggaggctaaaaagatgaaatttgaccgtataagagatttacgtgaggataatgatttaacacaagattatttaggaaaagttttaaatgtatcacaacgcacctattccagatatgaaaatgacgaacgcgctatcccgattgaagtattcagtaaactggccgatttttacaacacaagcgtagactatctgatcggccgcacaaatgtgaaggattcctattcgaaagctgaataggattcttttccttatatgaatcgtccctatcatcggcccagtttaaaattatttttttatttcaatttttgcttgacttattggaaattaaatagtatgataagaaaagtattttaaataaagccttgattccgcatatttatcgtagtcatttttttattgttgattacgtatatatgctttttttagttttatagaaaatgcataataaaatttcaggaggtatctttcatgaataaaggtacagtaaaatggtttaactcgcaaaaaggattcggttttatctgcggagaaaacggtgaagatatatttgttcacttcagcggactggcaatggacggatataagtctttagaagacggtcaggaagtcacatacgatattgctcagggcaatcgtggacttcaggctgttaacgtctcagtcgcttaagtcagacaattaaacgaatttgtaaagaagcgcaagcccggtcctgcgcttctttcttttacttattcactcttcccagaatataatccgcacttacaccatataactcacacagctttaataaatgtctgacaggcaattccgatgcttctctctcatatcttgcgtacatggtctggctcgttcccagatattctgcaacctgactttgtgacaagtcattatcttcccttaaatcgcgtattattttgacatacttcataactatattatccccttttgataaaaaagaataacatagtacatatatttactattgattttagtacatatatttactaaactatttttaaagctacagtaactcaggaggaaaaaatgaaaaagaaatggatccgcattaaaaacaacacattgtattactggtccgtcgtcgacgttgctgtgaccggcttcgtattccatgtgatacatataataaccaaacgaaagcgtcctaccatgatgtccaaagatatgttcagggaattagaaaggctggtagaggaagacagaaaagcgagaaaataaggcaacggaagaaggttctggaatgaaggagtaggaagctgcagccccttataatattgttactttgaggggctgtttgtggcgggcccgctcccaaacttattatatcttatctgatccggatattcaatcggcccggcctgaccttataatagccataaaatgctaatacagatctttttaaactctataaatatcataaaccataattacctgcatattgtaaaaatggaagaataaagtaaggaatccgatagcttccttaaattttattaaccttttctaaatccccttgaagtcgtctcaagagtatgctataatcagtcgaagttaaagaatctgttaaaattatgttaatttttaagtaacagttccactactatggaaggtgatcttatgaaaaattttctaaagaagtacggacatctgtggattctgggatatggatttatctatctgccctggtttatttacctggagaaaacgataacaaagcactatcacgttatgcattccgtagtggacgactatattccgtttaatgaatattttgtcatcccctatttcctctggtttgcgtatgtagcagtaactattgcgtatttcttcttcgtaaataaggaagattattaccggctctgtatctttttatttaccggtatgaccatcagtcttctggtctgtacactttttccgaacggtacggatttcaggccggtgatagacccgaataagaatctctgctcccggattgtggccatgctataccagaccgatacctgcacgaacgtattccccagcgtgcatgtctacaactctatcggaacacatattgcgattatgaagagtgaaagcctcaggaaatacaaagtggtaagagtaatgtcctttatcctgatggtatctatctgtatggcaaccgtttttttaaaacagcactccatcatcgatgttgtcggagcagttcttctctgcggagcaatttacccgctggcctatgccggaagcagccaggaagagacacggcccgaatttatacggtaagtacgttatacgaaatattgtcacacgacaaaaacgacaaaaggcatgctatggcatgccttttgtcgttatggaaaagctttgctgctcctttccccctgttcttctaattgaatccatagaatttctgcgtgattttgtagcaggcgatcgaaaccttccgcccgctctttccgggcaggttcgttccctgtccgaggaacccccatcggagtctgatataaagccccaggttcttctgtttcagatactgccaaagctccttcttcttagccaggttctcctctgtctccgaacggatcgccagaatcgaagacaccgtcatcatgatctccagatagcgtatcatataacgccgcagcttccggttcggcatcttcatcacatcataatatccaagcatcagcttcgtcacgcggatctgctgatccagcctccctatcataacggtctcgttcaccgactgatcttctcggccgatgaaataccggtaaaagtttacatccagataatacatggtctttacatgcggaagcggctgataaacgaatatgttgtccacgtaaaaagtatgtttcggaagttccaggccgcattcccgcagcatttccgtacggtaaataacggaatgcatcaggatatactgccccagcatgaacattttaaccccgctccagtcaatcagctcttcctttggaatggcggtcctgtaattcattacctttttccgctttgccccctgtttctcgtatacaaagtttgtaatcagcatgtccagggtgacattgtcatggcagaacttgcgcagggtcttaagtacctcacggtaagcatcctcattcacccagtcgtcactgtccaccaccttgaaaaaaacacctgtggcattcctaaggccggaattgaccgcctcaccatggccgccgttctcctggtggatggcgcggcagattcccgggtaacgtttttcgtattcgtctgcaatctcaccggtgttgtctttcgtagaaccgtcgttcacaatgaggatctccacctcatcaccgcccgggagcagcgattcgatacaatgcctcatgtaagccgccgagttatagcaggggattgcaactgataaaagtttcaatggtctttacctccattactttctctaatgttaaatgtccgtaactgttccatacttcctacaacaggttcctcttcctgaaaaaccggatttccaggataattataataatgcttaacactcccacagccggatatccgtatttccacgtcagttccggcatgtttgtaaaattcattccataccatccgaccagcagcgtcaatggcagaaaaatcgtagtcaccacggtcagaatgcccatggtgcggttctgggcaatatcgatctgcgactggtacatctcgcgtatctgcaggatatattccctcagaagcgatacatggtcgccaagccgttccactcggtgggcaaagatcgcaaagccttccttttcctccgcctcaaagagatggtttgtattggagcggaaaatatcggccatatcggcaagctgggtcagaaaagactggagatggagcatgtctttgcggcagcggatgatcttctcataaaagtttttctgaagccctttcgtcatcttgtcttccatcacaatcagcttgttctcatatccctgcaggaaaatcgaatccccctctatcagatagtttaaaaaaccggtaaaaaatgcagacatactgccctgctccccgtattgtatttctctcatcctgtcaaatattgattttacgtgctccccgccgccttcaacgaaaatgagcctgtcctttaccatatggaagccgaagctctccttctttcccggcagattctttacattcgggacagcaaaggtgccgataatacaactgccgaatatctcggccttacaatactgaatctgctccaattgcctgagcagaagctttttatgcgatatctgttctttatccgcttcaaactcctgtattgtcatcagttcaatgcggacatcattccggccgtattcctcctcttctctcattggagaaaggctgccgttcaggcggtaccgtatcataccatctgctccatctgttcattgacactgtcctcgcaggaacgcattgccagtattgtctgttccagcagtcggtccagttcccagccaagctgcgtagcccccctggtaatcacatctctggagcatcctgcggcgaattttttatctttaaacttcttttttaaactggaaagctccatatcctttgcgctttttgacgggcgcattctggcggcagcaccgatcagtcccgtaagctcatccgaggcgaaaagcaccttctccatctcatgctccggcgctgtatcgacgcggatcccatatccatggctgaccacagcgtgaatcagttcatcttcggctcctcctccccttaaaagctccggcgcgcgcagacaatgctcatctggatacagttcgaaatcaatatcatggagaagtccgacgataccccagaaatccgcatcctcaccatatcccagttcgtcagcataccagcgcattactccctccacagtcagagcatgaagaatgtgaaacggttccttgttatatttttttaataattccagtgcctgttccctgctaagtgaagttttcatatcctatttcctttcgtcccttgcctgtctctgtcattccgccgctaaacgactgcctgcagaatggcggccttgttcatcttacttatagttatatcaaaatcttttagaaaaataaagcttcttttcatacaatttcatacaaattccttaatattttatgcagtatttcaaattgtaacgccggaggtattttccccctccaacggacaaacgataacctgcacactccgcacacaggtcaccgccatcaatcagagcgtaattttgccgatacacttttcgatacaccacttcaaatctatcttttcggccgtatcagacgcgtaaatcggatagctggcgaccagctcatttcccacatagtaagaggcgcttcctacaggagtccccgccttcaccggggctttcagttcctttggatactcatagcggatatcagtagtctcatcctccctcatcaggactttcagggtctgatcctgttctcccaggcacagggacagggggacctcatcttttttaccgtctataatctttaacgagggaaaggtcttattcttttcaaatatttcataataatcgtaactgtcgaaggcaaatcctgcgatttttcgcatatcttcccatttatatgtcttatggggaggccagccgcagcccagcaaagccacggtaaactccttgtcatcctttttcagcgcagccacataacagtaaccggcgttcccggtaaaacccgtttttcccgacaaagcctccggcatcatggacaagagggcattgtggtttcccaggtaaaaggaacgtttcccgctttcatccgtgatagttctggacgccgttctcgtgatttcaagaaattccctgctttttggagactgttccacgcagtaacgcataattctcgccaaatcggccgccgttgttgagtgtggttctccgtctgcttttcgtgtaccgtccaggccgttgggagtcacgaaacatgtgtcggtacatccgatgtcccttgccttctggttcatcatttccgcaaaaccctccacggtcccgccgatatgttccgccacagccacggccgagtcattgtgtgactccagcatcagggaatacagcaaatcctggagccggtacttttctccggcacgtatattaagctgtacgtccggcatcgacgctgcataggatgagatctcaaccatatcttccgggtttccctgctccagcgccagaatgcatgtcattatttttgttgtgctggccatgggcctttttatggtttcttccttgccatataaaatacgccctgtggatgcatccatcagaaccgccgactgggcacacagcttcggcccggctattttctccccttccgtatccggggcgggctccagtccggcttttgtcacggtttcagcctgctctgccgtatcgcttccattctccgccgccaggcaaaataccgccgtatccgtttctgctcccacggtcacaagaagcagccccagaattacggcggcagtgatttttcttattttatctctcatccccgttctcccaaaaatctcctcaggaaaactatatgcggggcaaaaatcaattattcagggaatccagcggttcattgagcttttccgttcccggcagcacaaaccggcctccggcaataatggcggttttggttccgtcctcatggactgcttcaatgcggtccagctctgaatacgggattgtaatatccgtatggcagctgaaataagcggcacaaggatcttcgtttctgcgcacggaaatctcattttcttttgcaacaatctctttgccgtccggattgaacatcggacagtcttccatccagctatagcatgtatctcccacggcaaaatgaggtcccgtcttttcggcaatcagaatcgggaacttatcgagaatctgatatctctgcgccacttcataggccgtcgtgttggtaccgatggcaaattcccccattgggagactgtcatggttcttcatgataatctgttttaccagcgccctgccttccttctcatcctcaaagttggcacagccgtaatccgccactcttccgtctttaaattccatatacagatctttgaactggaaatcaccgatataaacactgccgacaaagagagttccctccgtaccggaaagtaccggggacgtgaatacctcccctaccgggatattgacatctgccacacagttttcgaaatttgtctccttagccgggttcttcagtctgcgaagcgctacctttagttttgtcctgttctcccccattccgtaaaccatcacatggtccgcctgatcgagggcatctataatacactgctggatgtcccggtacagctcatagtccagcgtattgatacgtatcgtctcctcaaatatcttttcaaaattatcacctatttcaggcagcgggaatgcaataatcgtaaagctcgtttccattcccggtacataggcatcggcaatctgcatcgattcgttcgaataggaaagcagcagtttctcctgcttttcacttaaggcaaacgcctcctttttattctcaggtgtgaatccctcttccccaaaagtctcaaggactgccggtcccgcataagcctttgccaaagtacggcattcctcatacgccaccttaagtacggacagctttctctctttgaaagccttatccatatagatggcattgtcgtaacggtgatcgtaatcatactgcctgttggcaggcgttccatgatatccgttggtccgcgccgccgcccggttcacggtgccgacagcagccctgctgatcacaggttccaggccaagctttctgaagttctccaccgccatccgtatcatccgttcaaatccgatatggtaacggatctgtaccgttttcttgcttttataactgcggccgctggcgacaaagccttttctgatgccttccgtgtaggtatcagccatttttctgaccgtctcctcagggagggaatttaaaaatgcggcaatctttagctccgaatcggaaatatattctccaaacctgtagagatagcgcaggtcggtgagatcactgtccataataatggtcttagcaaaatcaagtgacggatccagcgtctcccgcacccggtaagtcagcattacatcacagtaatcgctgacaaaatagtacagcacttcttttacttccttcagttccggttcttccgactcgaaaagattatagacctcaatcagcacttcctccagtatcgtcatatccgtcaggcggctctcgtaggcatacactatcatccccctgatctctgtcaataaaaaggcgagatactggccgaaatccctgcccagagcagcgactgcaaaagcaggattacagaagctttcctcatagttcccaggaagcacatcctcgtagagctttatattcagcttctttgcttcatcaaggctcagtgcttcaagctctcctttctcctgcatcccgtacactttctcggccagcatgataaactccgccgcctttctgaaatagcttcggtacggctcagccacggtctcttcggtcttaaactgaccgattctttcaagagcaagttcatggcgctctttcaccgcctcgttttcctctttaaacatttcccaatacttcatcataatcacctcttaaatcctatcagtaatattacaaaacataaaatcaccattgctgcggcggtgacagtccctgctttagccagaatgtaattcttttcccgttccttaaacgcccggtaaccgtaacgcaggccggctattgaaaataaaacaccgcaaaagcaggctgccaccgcccctaaaggcgtatttccctggcttctgatactgactgccattccggctatacagagtaccagccctgctgccgcagatatcacacacggaaaactgttttccgccatcggctttttaatatatgaaatcctgttatctgtctgacgcgccacttgccatcctcctgactccttttgccatgcagacgcagatatagcctgcaattcctcccaatgtatttaaaaacatgtcatccacatcaaaacttcccaccttgaatatgagctggattgtctcgattccaaagctcatcagaaagcttaagagaaaggtattataccactttttccctctccggctgataatcggcaggataaagccaaacggcatgaaacagatgacgtttcccaccgtattcagcagaaaggaacgcatcccaagaagctccctgtatttgtaaaaacgtttgatctccttaaacaaaatgagattgtaggcgtactcttcatgtcccgaacggccgaaaccatccgaaaaaaacataaaataagtcaataccaccagataactgatgaaaagaacccagcaaatcttctggtgcatcctggtcttttttatcatattttccccatctatcaataaacagccgtcccggaggacagcgcccgaattttccatttgaaattccccgctgttttacgctgcggacggtttgatacatttaccgctgcgcaaaaaagaatactgcaaaggctctgctgttcttcgacaggttaatccgtcttaccagaagaagctgttcctctgcagtaccgtatatccggcggcatataataaagaaataccgccgtttctcataaagtgcctgagtaatagcactcgctattactcagttattaatgcaacgctgtactagagcgtgtctgaaaattgctttctagctgtgcgtcacactttgtgggagatttggcccgaatggaggaggcgtagtgggctacgctgactgaatttgggccaaatatgccgcaaagtggggcgtgcagatggcaggaatgaattttcaaacaggctctagaatgtaatttccgatttacgcttcagcagacaggctccgctgataatcgccaaaacgcccgcggccactccggcggtaataatcacgctgccgattacaatgttgataacgcctgcattgcgcattgttttatatactttctccatatcggacactccttatttaagattctgcacgccgtaccgccgcgaacatgccatgaatcttctgcataccgcaccgccggtctgactgcttccatttttattttgccccatactgcccgtaataagcatcgattgccgctttcaatgtatcgtcaattactattttaccctggcattccctgttatataagtgttcaaccacatcggccatggaaacgatggctgcagtcggaaaaccgtaaagctcccttacttcttccagcgcactcttctcgcccttacccctctccatgcggtttaacgaaaccatcagccctttaatttccacatcggcctgggctttgagaatcggaaatgtctcctcgatggattttccggaagtcgttacatcctcgatgataacaacgcggtctccgtcctgtaacttgctgcccagaagaatcccggtgtctccgtgatccttcgcctctttcctgttggagcagtagcggatgtcctttccgtaaagctcgctgatcgccatagtagtagctacggcaagcggaattcccttatatgccggtccgaaaagcacgtcaaaatcaaggccgtaattgtcatggatggcctttgcataatactcgcccagcctgcgaagctgggttccggtcacataagcacccgcgttcatgaagaaaggggactttcttccgctcttcaacgtaaattctccgaatttgagaacctcgctctctaccatgaattcgataaattcctgcttgtactgttccatacgtttctccttctatcactgccgcagaatcccttgctctttggtcgttttaatttattcttcatttttattattcattgtgctgatgcaccgctgctttgtatgtgcttatctgaccgctccgaccagctcgcttatatcctccacatggtactttgccatatagtcttcaatccccttcacgatctcaaccgtagcatacggattatggaaattggctgtgccaaccgataccgcagtcgcgcctgccaggataaattcaatggcatcatccgcattcatgataccgcccattcctatgatgggaagcttcacggcattggctgcctgatagaccatcctgaccgccaccggtttgattgctgggcctgagaggccgcctgtcctgttggccacggcaaaggtcctcttatggatatctatcttcattcctgtcagcgtgttaatcagtgagagtacatcggccccgcccgcttccgcggccctggccataacggtgatatccgtcacattcgggctgagcttcatgataaccggctgttttgcatatttttttacttcgcgcgtgattgcctccacggccttcggatcctggccaaaggcaatgccgccctcttttacgttgggacatgagatgttaatctccagcatgtccaccggctcatcggacagtttctctaccacatcaatataatcctccgtggtttttccacagacattgacgataatctttgtatcaaactgctttaagtaagggatatctctcttcgcgaacacctcataccccgggttctggaggccgatggcgttaatcatccccccgtatgtctctgcaattctgggtgtcggattcccgggccatgggatattggccactcccttggtgacaacggctcccagcctgttcaaatccaccatctcaccgtattcggcgccggatccgaaggtgcctgatgcagtcatgaccggattcttaagctccactccggccagatttacttttgtattcatcataaatccacctcctgggccagaaatacgggaccgtctttgcagatccgcttattatggacattgctgtggtgatccacctcgctgctttggcagacgcaggcaagacatgctccaatcccgcaggccattttttcttccagggaaatataacagcggatattgtgttccatcgcatattgttttaatgcccgcagcatcggcgtcggaccgcaggcgtacatcacatcggccgtcaggccgttctcccggatagcatccaggacattgccctttgttcccgcacttccgtcttccgtagccacaaatacctcgccgtacgcctcaaactcgtctctgaggaagagattcccatcacggtaaccaagaatcatctgcttctcacaattcaggttctttgcaagctccagcatcggcgggatcccgattcccccgcctatcagaaagacattttcgccctcctgtggaaaaccgtttccgagagggcccatgatatcgacggggtcccctgactcaaatgaagaaaattcctttgtccctgcccctgcgattcgatatacaatacgcagtcttccttcctccggatcggcctcacagatactgatcggccttgggagcagtctggagccgtccttgctgtacacggaaataaactgccccggtttcgcctctttcgccgtctctgtcgtgatccacatactgaaaatctcaggagccagttcttcctgactgtatacaactgctgtttctttcacctgtgccataggttcctcctacaatacgctgttaatatcggtaatcatgtcaatgactgcctgcctggatgcctcaccaaaatgctctgccccgaattttacataaggctctttcttatatgcggcaatgattcctctggaggaattgactactgctcccagaccatcttcattaaagcaatattttaaatcctcagccgttccgccctgcgctccgtagccgggcaccaggaaataagtctttggcatcagctttctgagcactctgctcatctcaggataggttgcgcccacaacggcgcccacgttactgtaggctccatccatggaggcttccccccattccaccaccttttccgctaccagctcataaagcggtttaccgtcaatcagacgatcctggaattctccgctggacgggttggaggttttaaccagaacgaaaatacctctgtcatactcattgcatacatccacaaacggttttaccccgtcggtacccagataaggatttaccgtaatatattccgtatcaaaacctgcaaaaacattacttcccacctgcaccttgccgatatggccggttgcataagcagtggaagtggagccgatatctccgcgcttaacatcgccaatgacaataaggcccttctgctggcagtatttaaccgtcttgtcataagccttcaatccttcaattccaaactgctcatacatggcgatctgcggttttacagaaggtatcagatccgccgtcgcgtctataatctccttattaaacagccagatggcctgcgccgccccttcaagagtctcgccgaactcatcgtacgctttcttcgtcacatgctccggaatatagctcagcatcggatccagccccacacaaatcggagccttcgtcttctgtattttttcaattaatctgctaaccatagtttcctcctcaggttttatcgtccttataaaatctgttatttttttcctggtgcgtatttgaaaattgctttcagtaagctgtgcgtcacactttgtaggcgattttgcccaaatgaaggcggcgtagtgggctacggcaactgaattgggaacaaatatatcgcgaagtggggcgtgcagattgcgggaatgaattttcaaacgcgctctaactgtaatcttccttattttaacataactcccacgctgtttcaaggcaaaaccctacgcattcgcagggtcccataccttcgccgtcctgtccgccggccgtaccggcagcgggcctcacctgtttaattaaatcctcaatgcagagacagggtcgccacataatccccatttttataaactttggcggcaaactgctcctccgtcaccgtctgaagctccatccatagttcctccgccgccagcataatatgagaaagcatgataccgatactgaaatctttcatcgcttccgatgcattcagtggaaagcggctctttttcgcaaagacatagatcctgtccgagtaaacgataaacctccatggctgtgcattaaaagccgagggcgccaggcgcgccgcctttaacaccgttttaatctgctcgcctgcctcttccttaaatacgcatagttcattcagcggcagcctctttgcaagcggactttctctgtaaagcttcccctccggccagccaaaggcggcaatcatcaccaggcgtttcccgtttttcaccgtctgctttacacggcttccgcccagatagcaggtgcccagtcctttcaccgtcatgtataatatgagctgttccatgatatatccggcatttctctcaaagccctcttccggctccgaatagaacgccaggtaataaggcgcgtcggtcttccacagaccttttacctccgccttcttcttcgtattgtccagaatctccagctctgtccgaatcctgtcattcagtctggaggttttttcaaaatatgcaaggatctgtgccctcaatctctccggcacttcccgatccgaatattttctgacggaatgtctgcttccgatcgcctcgtacaggttcatcctggtatccccctttttctagataagccctgacacaagaggtaccacaagcacggttaggagtcccgacaccgcaatggccaggctgctcatggctccctcaatctctcccagttccagtgccctggcggttccgatggcgtgggctgctgtcccaagcgccaggccttttgccataggctcttctatctttaatattccaaacagccagtcggcaataatattacccagaattcccgtaataattatgctgactaccgtaagtgtcacaataccgcccgcttcctcgctgacgcccatcccaatcgcagttgttatggactttggaagaagagttacatagtgggcatgctcaaggccgaatgcctttgacataataaaaatgctgcccgcgcttccggctacgcctgccagaatcgccgttcccaccgccaccagattcttcttaagaagttccagctgcctgtaaagcggaatcgcaagacagaccgtggccggagtcaggaaataactcaagaaaccggcccctctattatattcttcatagtttatatgaaatgccgataaaaatgcaataatcaaaataattgccaccagcagcgggttcagaattgcaagccccgtcttctttctaagccacaggccgaaaagataggctcccacgcttaccagcatcccaaagtaaagtgatgatccggctaactggttcatacttcttttccccccttacgcttctttggtccccgtataatattctgagccactctgccagtcaccgccatgacaaaaacagtggaaacgaccgaaattaccgttagcggaaccaggatgcttttcgcctcatccacgctgttcagcaggcctactcctgccggtataaacataagcggcatcgtatccaggaaaaaatcgccgacttccgacacatcctccaccttcagggtccctgcgcacagcagaagaagaaggataaataacccgtagaccccggcaggcacgggaagcggaagcaggtagttgagaaattcccctgccattgtaatgccgaaaataattgctacttcttttaagtatttcattctgtcatatctcctctcgtctgaacgttttaattctaacactccattttttataggacaatatgaaaagtacaataaaatcgtagaaaaatcattgaaaattttgccttttatgtactatacttaataaaacgaagcagcagcgcaaataataacaggagccatcatatgcagattattaaaaacagccgcctgaccggaaggcaaatatcggacatcgaccatcttatacaggaatgcagggcattttcccccatacggttaagctttccgtttgaggaaggctccgttttctatctcgcttatgaaagaaaagacggcgctgatatgctggtcagcgtcctggcgcttattatacccaatatggacgattctaatgaaactttcgaatgtctggcctttacccgtccgtcttgcaggcggaaaggttacttttctgcgctttttgaggccgctgaggagctgtttgaagatgccaatctcctgatcccctgtgacggacaggatgaggctgtccttccggtccttcattcactggggcggaattagattcctgcgagtataaaatggaacgtaccctgactgaaaatgatcttcccgatatgtcagccgcaggcgcacgcctgtcctgtcaaaccagtctggacagcgacggttccaccgtctattctttctgcctttcccaagagaattcccggcccgcagcagtctgcaggacggtctctttcggcagcaaaatctgcttctatggttttctggttgaagaaactctccgcggtcaggggttcggcgaggaagctctcttaactgtgctgcattctctgcggaaccggaatgcgtcttccctctttcttcatgtctccggcgaaaacccggcggccgtaaatctttacaaaaagacaggattccgaattaccgaaaccctgtcctattatctctactgattatctctggacgatgattcccttttcctcgattctctgcctgacttccagcatcttccagtctgtctcggcaataatctcggcgcagtttctaagctcctgcccaatctcggcggcatcttcgtcttccagatcttttttatatttaagctggtgatccagactggcccagaaatccatggcaatcgtcctgatctgcacctccactcttatctgcttcttactgtcggaaaaatatacgggaacttcaattatcatatggtagcttctgtacccattctccttgggacagcggatataatccttgatagctatcaccttgacatcatcctggcgcgccagcatcttgctgatctcgtaaatatcatcaataaatgagcagataacgcggattcctgcaatatcatccagattctgcatcatagactccacagtaacgggaaggtctcttctctgtaacttttcaactatactgagcggtctcttgatacgtgatttaatcatctctatcggatttcgggaatttcggacggaaagctcgtcattaagtacttccagctttgtcttcacttcccggatcgcacaggtgtactgcatcatgcactcctggaattgctttgccattccaatcagcgtgtccggaacttcaaattctttcggtgcgttaacagcaaactgggtcagttcactgtttggattcaggttaatattcattgtcaacaccccatcaatttttcttggccgtaacccattttcattatacatgaaagcaagggcagaaacaatgaaagaatccttaaattttcgtaaaccaaaaccgtaacagtaaactggagatttagttaagcaggtgaggacgccgccggaacggccagcggacggggtggtggggtgtgtatatgagtctttcgtcccggggaagattgttgtgagttggggctgcgggagaagataaagtctgcggagcacgctcccgctctgtgaaatgcatcgcgctgctaagctcgtaagggacctcgctaatcagcgatggatttcagcggcatccgcagactttatcttcccctccgccccaaggccaggttttcgccgggacgaaagactccgccaagtgtatcggccccgtccgctggcctgcggccgctgatagtctcacgcgttaagtgcgggggcggaccttgttgcggccacgcagtgctaccgtgtacgggaaatacgatatgccttccatgcgcctttttaaagaattgcggaagatttgataccggcctgccggaaacacgtagtggcggcgacaaggctctccccatttaaggttagagacaatcagcggccggagcggaccatgtccacgaaaacctccgcctgagtcttccgtcccggcggaaacctgaccgggggaaggaggcggaatcaattctggaggggacatggaagcccatccgtgcttaatgaggttttttcgaatttagcacggctatgcgcttcgaagagtgcaaacggtccccgtaagaattcattctgaccggattcccccctcacaacaaccttcaaccagggacggaagactcagacagcccccctcaccacaccggacatggtccgttccggacgcgtcctcccaacctcagttaaatctccattatgctgcagcaaatgccccgcgtgtgaacagtaaccatttacaaacataagccgcctgtggtatgctcagatcagcagtttcgcaattcactgagcttactaaaataatacacaggaggttgctatgaaatatctaggctattacaacggaacttacggaccattggaagaaatgatgatcccgatgaatgacagggtctgctactttggagacggtgtatatgacgccacactggccaggaacggtaaaatctttgccctggacgcccacctggaccgcttttacaacagtgcgggccttcttaagatggaggttccttattcccgtgaagaactggctgaaattcttaaatctctgctgaaagagatggacgactcggagattttcgtctactggcagctgacaagaggaacggccatccggatccactccttcccggagccgccttccaaaccaaatctctggatcatgctgaagccgggttccctggccgcaccgtcaaaaaccatgaaactcatcacccaggaagataccagattccttcactgcaatatcaaaacactgaacctgattcccaacgtcatgggctatcagaaagcccacgaggccggctgtgacgaatgtgtattccacaggggcgacatcgtgacggaatgctcctcctgtaatatctccattttaaaggacggcgtgttcatcacacacccaaccgatcactatatacttccgggcatctccaggatgcacctgattgaacaatgtaaaaaactgggagttcccgtggacgaacgtccttttacggttaaagagatgatgaatgccgacgaagtcatcgtatccagttcttcccggctgggcctgattgccagtgagatagacggacagcccgtgggcggaaaagccacggatttgtggaaaaaagtgcagctttcctattttgagagatttaagaaagctactgagtaaataaacgggcaaaacggcagccggcggactggcgtaagcggcgtaaatgagtcctccgtcccatagccggcgtccggcgggacaaaaaactcgtaacagttcagacagtatgaactgttacgagggctcagcagcgttatctatttaatcaatccctcaactgcctcagccgcctgatccagccatggcgtctcaatatattctaccactccctggtcaacgcgttccgcaatctgaggattaatcggaatctgggcgagtaccgggattccatattctttggcggtctccccgatacggctctcaccgaacacggagattctctttccgcagtcaggacattccagatagctcatgttctcaaccagacccagaatcgggatatccatctttttagccatgttaacggcttttgccactatcatcgataccagctcctgcggtgaagtaacaatgatgattccggccagcggaagcgactggaatacggtcagcggcacatctccggttcccggaggcatatccacaaacatgaaatcaatatctttccagagagcctctccccagaattgtttgatcacgcctcccacaatcgggcctctccagatcaccggatccgtctcattctccagaatcatattagcggacaatatctctatgcctgtcgcgctcactcccggcatcatcagattatcgtcggaaacccttaccgtctcatggataccgaatgcctttggaatggacggccccgtgatatcggcatccagaatcgcagtacggtaattttttgctctcatcttacatgccatcagggaagtcaccagtgattttcctactccgccttttccgcttactacgccgattacttttttgactgtgctctgtggatttaacggttctaaaaagctctccgcagtacggctttcacaattttcgctgcagctgctgcagttgtggttacaattttcgctcattgccatatctccttgcctgataaattttgctttcaattttttcaggaatgctttgcaggacggtgttccgtcacacgccctgtgataagtatttcccaaagcctgtttattatattagcacattctatgatttttgtcttgttttattcagtatattattactaaatatgcgggagaagggaaagcaggtgaggacgccgccggaacggccggcggacgggatgctggtgcggaccttgtcgtggccgctcagtgcttccatctgtgttagatagatgataaatatgggctgatgtagatgtttaagtatatttattggaaatttacgatatttaatatttacaaagactgagcggaattaagtccggaagaatatcaccggatttaattccgctcaattatctgtaattgatggcggcaacctgcacgcggagcgtgcaggttatcgttgatttaatattagtgtaatatttacatgggagtccgccggtttacgctctcgcacccggcagtctgaatttccggattgccttcacaattccggcatcctccatcttcttcgcaatcagatagaacagcgccgtatcgattggccacatgatcatattctttaccagacgcatcggaatcaacgcaagtatgcccttaccggacatcatgctgagaaacagcgtgttgaggaatacgttgcagaccatgatgacgatgaagtgaaccgccagggttctcttgaatgtaagaggcctctggtagaggaatgttccgtaaatgataccggcaagtatggcgttaaacgtgaatcccggaaaaaatgctccggtaggtttaaccacatatttaaccaaatccagaactccgccgtagaagcctcccaccacaggcccgaacaggaagtagacaaattggttgactacgcttccaaatccgattttcagatacggaccggcctcaattgtaaagtatccaagtacgacggaaacagccatgaacatagccgcggttgtgattgtcctgacctgtttcagctcccggcaggaatcacggtatacagttgcaagtttcttcataaaaaaatacctccttctgcagaactctcgatccacatcaggagatatatactatcagcgatgcagcgggatgcgggatacaggccgcggggatttccccttcgtccggatgtcaactccctgttcatccgacacttgacgcctatatgcctactctgcgttctttaatttttatagcctcagtataccactaaaattatacttttcaatagttctgtgaacataccatccaataaaaattccaagggccattccgcttaacacatccgtcggaaaatgcacaaaaagatataatctggaaagtgcgataaccgacgccaggacgagtaccggcaccccccatttcctgttatacaaaaagatgctgaccgctgtctcaaaagaggccagggtatgtccggagggaaaggaaaagtccttcggattctgtatcagaagccggacactttcatcgatccagcagggccgatcccgcatcacaagatttttcagaaccacatttccgatgaggccgcccgctgccagtgaaagcagcacagccgcccccatttttcttgtccgtttaaaacaaaaaagaatgatgcccagcacaataaaaaaccatcctttatcccccagagaagtgacggctgtcataaagcggtccaggaacggcgtatgaagcccctgaataaaataaagaattgaaaactccagttccagcagagccataaattatgattcctctccctgtgtatccgaatattcacggaatgccttgtccatttcaatgtaattgcgcttaagggatacggggcttccatcccggttcaggaaacagtgacggctctcaccaacacagcgcacctgggcggtttccttatcaattaccgtgtattccagcgccatcttaatcccgttatattctttcaggctggtcagaacctggactgtctcaccaaaacgtgacatactcttgtattcacagcggattgacaaaaccgggcagataattccctgtttttccatcatatcataccccatgcccatctgttccattatatcaatcctcgcctcttcaaaccagtgaagataattggcatggtggatgattcccatctggtccgtctcgtaatattgtgttttgtgttcatagacttcgaatttcatcgtaaaattcccctttctgtttcttatagcgcaaaagagagtatcgctacgtggcaatactctccggcagttcagcttaattcctgttgcggtgtaacatatgaaactgtttcaccgttttcaatgcttattctccaagcccgctctcgatcgcttcggaaagagtcttcaaagcttcttcctcatccggtccgtcacagatcaggttgatttcagtaccgcacttgatacctgccgccataacgtttaaaacgctctttgccgtaatttctttttctccgcatacaatcttaatatcgcttttgaatttcatagcggcctgggacaaaacaccggccggtcttaagtgaagacctgatggattattgattgttaatttttttgataacatattttattctccttcactattattgtctttattaatagtactttacgttcttttatctgagtttaattaaattctagtataagttgtattgactgtcaagtacaggcaccattaaatatttcccatgttactgttcacaccatgccaaaaagcggcatgctggaaacaataacacgcttcgcgatgcacagaaactgcaaaaaaacgcagtttcgcgccgtgaaacccaggattttcgtgtaaaatgcgcacgaaaacacctcgcgaaatacaacctgtgaacagtaactttcccataatttcataaaggtattgtccccaccgcaattatctacaactgcttgtcttccataatggcggtctcatgcctcctgacattctcctctgcccccggatgctgacagataaaagaagataaagaatctctatcaccatagtggccggaactcttgaaaacaggaaatcttctctcagcagtttttcccttgttgcggttgtaatgtgatagtcggaaagctttgccaccggcgattccgggttgttcgtgatggaaataaccgtcaccccgttgccggaggctccttcaagtatccggatgagtcttctcgacactccggaattggaaattgctatgataacatccttttttccgagattaaaagcatatgccgtctgggtttctaaaattgtcccagtcgcagccgggattcccagttgattaaacttgaatgcggcgtccaaagcgaccggtatcgtatttccgaccgccacaagctgtaccatcctggccttctgtattatatccaggatcctgtccagattttcgggatccatcatggccaccgtctgccgtatttcttccgtcttgttagccagaatattctgcagtgactggccgatatccctgcggctgatgtcatttcccaccgatgcctgggattcctcggacagctccctggccagagtcatctttaattgatgaaaccccttgaaaccgcatctccggcaaaatcgtgacacggaagcgtcactggcgccgctggcctgggccagctcggcaaccgtcatgtccacgacctcccgtttgcgctccatgatacaattggcaattttcttctcggaatcaaaaaatgaatcataggaggagcatatcacgccgattacactttttgcctcttccatatttcaccgttcctattctgcgtgtaattttatttcatgacgtgattatatcacagcacctgctgttttacaatggtatttttacagaaatacaagtttttataacatttcagtaacagctcttgctgtctgaactgttatacattttaaccaattatcttctgcgcataggaaacagatgccatcgcgtcgctgcaatatgcgtccgcaccgattgtttttgcgtattccggtgtcagaacggctccgcccaccattatttttgtccagggagcttcctgcctcagtctttgaatggtttcctccatagcggggacagttgtcgtcatcaatgcactcagtccgaccagcggtacatgctgtttgaccgcttccctgacgatctgttccggcgcaacgtcttttcccagatccagaacatcatagctgtagttttccagaagaaccctgacaatattctttccaatatcatgaatatcgcctttaacagtcgccaggatgatttttcccttcttctccctggcctggcctgattccgccatcttctctttgattacatcgaaagcagcttttgctgcttccgcgctcatcagaagctggggcagaaagacggttcccgcttcaaatccttttcccacatgatccagggccggaatcatgcaggtgttaataacgtccagcggttctttttcggcgagaagctgttttgccgactgtgccgcctgctccctgagtcccttctccacactgagggcaaggcgttcctcctccccgtcccatgccggattgttcccctgccgtttcccgagccgggcgccgcttccgctttccgtccggccgtatcagatcccagccggtttccggatgtgccgggcgccggactgcctgaaccggcggccgatgaagccgccgcattcttgtatgcctcgatataacttccgcagttctcgtcgagtgcagccagggcacggaagctgtggtaagaacacatcattgcctccgaaccggggttgatgattgccgcattcaaaccgttatagagcgccagcgtgaaaaaattggcgttgatattttctcttacaggcagtccgaatgatatattggatacgccaagtatggtcctgccacccatctcctgtctgactcttttaactgtctccagtgtagtaagcgccccgagccgatccgaactgatcgtcatacacagggcatctatcaggatatctttttttccaatcccgtactttgccgcttccctgtaaattttttctgctatggcgattctgccgtccgctgtctccgggattcccgattcatccagggtcagggcaaccactactgcaccgtatctttttaccagcggaaaaacggcgtccatcacttcctgctttccgttaacggaattaaggagcggtttcccattgtagacacgcatagcccgggccatcgcctccgtattcgacgtgtcaatctgaagaggaagctccgttatcccctgaagctcccggattacctccgccatcatggacggctcgtcaatctccggaaggcccacattgacatccagaacatgggcaccccgttcctgctgcgaaatgccttccctgaggataaattcgagatcatgatcacgcagcgcctgcttgaatttcgatttccccgtcgggttgatgcgctccccgataattacaggatcatcgcctatctcaaccgccgccgcataggatgtaattaccgtactctgcttctcctgtggcagcttctgtcttcttccggcccgcagccggttaagccgcctgatatgcccgggcgtggttccgcagcagccgccggcaacggaaatgcccatatcaagtatctcttccattgcctgctcaaattcatccgggccgatgtcgtatacggttcttcctccttcacttcttggaaggccggcatttggatttacaataacaggaaccgaagcgtatttgataaattccgccgccagaggtttcatctgaaccggtccaaggccgcagttcattcccacggcgtccacgccaagtccttccaaaagagcgatagccgtctgcggcgtaccgccggtcagcatcttccccttctcatcgaatattacagttgcaaaaacaggcaggctgctgatctctttggcagccagcacagccgctttcagctcgtaagtgtcactcattgtttcaatcaggatcaggtcggcaccctgttccgctcctgtttctgccacctccctgaatactgaaacagcctcctcaaaatccagttgtcccatcggctttaacagctttccggtcggcccgatatccagtgcgatatatccccgccctgcctttttgaccgcgcatttggcattgtccatcgctgccgttacgatttccttcaggctgtactgtgtaccgctgttgtatttgaaacggttcgcaccaaacgtatttgtctttataatatcacagccggcttccagataatcgctgtgcagctttaccacaatatcaggatgactgatgttccatgtctccggtaattcccccggtttaagtccggcctcctgcaaaagactgccggttcccccgtcaaacagaaggattttttctctgagttcctctaaaatggccatattttaacctctccggtacaggcagtccgttttgccgcatacctcacatccttttaattcacaccggaattcattccttccggcccctatcactgccgtcacggatttcgacggcgtcatcagaaggctgtccgtcaaggtaaccccaacggtcttctccgcctccagcgccctgattatatccttctggcagtccagtgaaaagtctccatatccgggactgaatctggggcgcaggtactttccctgcctgagcgcttcttctttcagttccccgttcttcctgtcgcaccacgcttcgatcatggcggcagccgctgcctgaacgactactgcacggctcatttcaagacggctgtacctgcgcaccagcagatccggaccggttcccagggttgccgcaaacagtatgacctcctcacagtctttcaggtttctcgacaaatccctgctctccacccggaagcaggtaagatcgagtttcccgtccggaagaaccgagagcgggtaacttctagaaaagaatctgggtgccgccgcattttcaagctccacgagggattcctccaccagcagcgccgttctctcatccggctcatggcggcccagtccaagatacctgtaaacctccctccggtttacttctgattttatactgtcttccatctgtttttccgtgtgctcctgttatagaatttccgacagactgtcccctatttttgccgccacatccggtttattcatagaatagacatggatcccgttcacatgattggcaatcaggtcgataatctgttctgtggcataagcgattccagcctgcttcatggctgcgggattatcgccgaaccggtctacgatggccttaaacctggccggaaggtaagtacccgacatctggcagattcttttaatctgctttacgtttgttaccggcattatccctgctaccaccggaaccgtaatgcctctttcccggattctgtaaagataattataaagtatattattatcaaaaaacatctgtgtagtgacaaaatcacagccggcttcaactttttccctcagatgctcaatatccgccgtcttgttaaccgactccacatggccttccggataacaggccgccccgatgcagagattttcatcaaactgcttgatatcatagataagctccgacgcgtagcggtaatcggttgctatggggccgtccgccgggatgtcccgcgaagcgccagcacattttcaatttgtttctctctcagctgcttcaggacggatttcacctcactccttgtcgaggaaacacaggtcaggtgcgccagcgtatttacaccggtttcccgctgtatatcagaggcaatcccgaccgtatagcggctcgttcctcccctgccccgtaagtcacactcataaatgccggtttcagttttgcaatctcaagggccgccttctccacagactcataggcctcctccccctttggggaaatacttcaaatgagagtgtgggactgccggctgccagtatgtctttaattttcatcgctgttctcctctcctgtcagcaactttcgttgcagttcagccttcgtccaaactgcagcaaattatgtagagcatgtcttcctctacagggcaaacatcataaacggtataacggcagacagaagagaaatcaggaacatgatgacaatgaaaatcaaaataaacgatgtcaccggattcccggcctttttcccagtgcctgccggagtataaaccggcccggtttgtttctgctgaatcctgcgcccggtttgattccggctgccgccgtatgcgggcatcccgcttcccggctttgccgtctgtccgtgagccgtttttttaatctgcggcttttgttcccgggatattgccggattatggtattcacagtccgtttcgtaagccggatggcgttcattcagataataatcccggttcattataatcggattcttcacataacttctgcaaacaggacaataatgctttcccttcatcgcctgatcgcagattggacatattcgttttaccatgctgccactctcctttcgtcctgacgtctgtttgtcatagtataccatgttcctcaggtaacatggagtctccgacggaaaacagcgccggatttctgcggtaaacgcagaaaccgtttatgcgcggtataatgcccgctatgcggtcattataccatatattttatttttttgaaataaataagcaggtgaggccgccgtcttgacagacagcggccgctgattgcctcacggttactgttcacccccgccaaaaaacagcgtgctgcgaacaatttatacatatgattgaaaattcatatctttcagtttataatatagtctatatttttttgtatacaagcagcgcgcccctctgaactgttccacgtcagaaaaacgggcgccgatatcacagacaagataacagggggattttattatgagtaaaagtaccttcagggatttcctgaaacgcaaacaaatcaacatttctgtacagacctacctcattgatgcgctgggcgcaatggccttcggccttttcgcttcgcttctcatcggaaccatcttcgcaacgctgggggacaaaacccatatcgaaatatttaccaccatttccacctatgccaaaagcgccacgggagcagcgcttggcgtctccattgcctatgctctgaaagcgccgacgctcgtgctgttttccgccgccacggtcggtatcgcaggcaatgagctgggcggtcctgtcggcgccctggttgccaccatcattgccacggaactcggaaaattagtttccaaagaaacgcctgtggatatccttgtcactccgggaatcaccatcacttccggcgtactggcctcccagtttgtcggccccggtgtttccgctttcatgaccgcatttggaaatctcgttaaaacggccaccgtcatgcagccgctcttcatgggaatcctggtttccgctctcatcggcattgcgctgactcttcctatcagcagcgctgcaatctgcattatgctgagcctggacgggctggccgggggcgctgccacggcaggctgctgcgcacagatggtcggctttgccgtcttaagtttccgggaaaataaatggggcggtcttttagcccagggccttggaacctccatgcttcaaatgggaaacattgttaagaatcccagaatctggattccgccgactttagcttctatggtaaccggccccatttcaaccatggttttccggcttgaaaatattccgaccggttccggtatgggtacctgcggcctagtcggcccgatcggcgtctatacggcgatgcaggaaacaggcggaacgaatatgtggctgggcattctccttgtctgcttcattcttccggctgtcctgacgccgatcttcggggctgcatgcagaaaagccggatggataaaggaaggcgacctcaagctggatttataagtaacatatataatccggcgttccatacgccggatagacataaagcagaaaaggacgaaagctaaaatgggctttcgtccttttttgtttcactatggattataaataatcatatgcaggattgccgttccatcgcccgcgtttttataggaatgaaccgtatcggctctaaaccggatgctttctccctgaccaacaataaacggctgactgtccgcatatatttccacctgtcccttgaatacggttataaattccgccgccccttttaaatgaggttccgactcccagaagcttccttcctccagttccagataatatacggcaaatctcctgttctcatcatccggaaagaccggatagtttctgaccttcccgttatcctccagcagcggctgtatctccgaggttttcacaatctgatacaggttctcggggcgaacggtcaaagcatcaaacggtactttcataccattcgaaattttccacaatgttgatatcgtcggattaccgtctccccgctcaatctgagccagcatgcttttgctgactccgctcagccgggaaagctcgtccatgctcagtttattctcttcacgaagtctcctgatattttttgcaacaatcaaattcattggatccaatttttttccatcctccctattgacaatatatcgcacagaatgtattattatatcgtatcgatacaatataacgttcattttgtattattatatagttttttcttatccttgtaaagggcaaaggaggttttcccatgaaaaaatctgttatagtcaatttctttaaatggtggttttccattcacccatccaatatagccgtctctgaagactggctaaaccttgaaaagaggctgaaagagaaaaaggaggtaaaccatgttccgtttatctgattttctgatttactgttttattaccgcatactcgccgggagccaacaatctgctttccatgagcaatgcgatgcgacttggcttttcccggagtatccggtttaatttcggaattacagcaggattctcaatcgttatggcgctttgtacgatattcagtgcagccctctactctcttctgccaaaagtaaaaatcgtcatgcaggttttaggagctgcctatatgctgtatctcgcatggaaggtctggagaagcaccggagatttgaataatgggaccggaaaggaggccagctttctctcaggtatgatactgcagtttgccaaccccaaaatctacatatatgcgattactgccatgtccctctatattttaccggtataccaatcgtttggggcattatgcggttttaccgtcctgctgtcggtaatcggtgcctcaggcacctacgtatgggcgctgttcggagcggctttctgcaaatttttctcaatgcatgccaggatggtgaattttgttatggcaatcctgctcgtgtattgcgccgtatccctgtttcactgaccgccgttaacgatatcctgcacgctccgcgcagggcttaccgtcttcaagcaaaagccgccgaaacaaaggcagacttctctctgcatgtttcggcggctcagaatcgtaaatcagatcggcgtctgctcctctctctcccttgctccctcttttttctccttcatccggcggaaataagaactcatctcatcagccattcccgacagtcggttgagaagagtcgaaaaatctttcagcatctcatcgtcctggaaatacggataaacaatatcatgatccacctcgctccacccctcttcaaacagggtcctggcctgtatctccacgtaataccccttatacttgacaatgtaatggagagaacggtaaatcccgtctgatttgatgtctatcaggctttcgtcataaatccggctgtcccctgtcctcctgtaaaccttggggcgttccgctatatagtaatgttcctcattcccatcaaaatctgcttcccggtcttccacatactgctccgggttattttcaaatacagaggtaatatattcatgaaaatgcttccagtcctcacggtacaggaaaaacacacggatgccgattaaatccgtcacatatttacagtaattcgtactgttaatcttttcaaatttctcaggatgttcattccttttacggataatcttttcaatcagatgccccggttcctttgtcctgtagcggtaagaatggattccggccttctctatatcataaaggtattcatccacaaaatctttaccgattccacggagcttccgttccagccccctgtaattgtcatggattgcctgaagctcctcccaggtaaggccagccgattcaaaatcttcgtaatccatattgtatttctcaaaaaatgtttctctgctaaacatcctctctctatacctctccggcgccaatcgaattcaggaacctggcgaatgccgccctgccttcctctgtgcatttataaactccggcgtcttccagaacccgttcaaatacaaggcctacctcattctttaatatctcttccacattctctttcgtgaccgcttcatactttggaagaaattcttccacccacgcggcatgcttttcaagctccccgcagcttctgatatctctgccttccacaatataatcacccaacagcgccagctcatctttcagcctggacggcagcaccgccagtcccattacttcgatcagaccgatattttctttctttatatgatgaagctcctggtgaggatgaaatacacccagcggaaattcttccgtcgtaatattattcctcagcaccagatccagctcgtacatatctccgttcctgcgggcaatcggggtgatggtattatgcggttctccctccgtccgggcaaaaacaaacgccgcttcatccgtatagtctctccaggcggcaagcaccttctctccaagttcaatcagccggtccgggttcccggatcttgtgcgcagcaccgacatgggccagtatactattcccatctccacatcctcaaaatctttgattttaaaatatttttcgatcggcgctttcgccatggcgaatgtgtaatgacctccctgaaaatgatcatggcttaagatggaaccgccgacaatcggaagatccgcattcgagcccagaaagtaatgaggaaacatttttacaaagtcaaaaagcttgacaaaggtttctttttctattttcatcggaatatggcggccgttgaaaacgatacaatgttcattataataaacatatggtgaatattggaacccccactggctgtcattgattgtgattggaataatacggtggttattgcgggccggatggttcacgcggccggcatatccttcattctcccggcagagcaggcacttcggatatccgctctgtttagccagtttggctgctgcgatagctttcggatctttctccggtttggacagattaaccgtaatgtccagatcgccgtatttagtgctggtcacccatttcatatccttgcagacgcggtatcttcggatataatcggaatcctggctcagtttatagtaataatccgtagccgcctgtgatgactgtccgttataaagctcccagaacgtccgaaccacctcggacggtctcggcatcaggcagttcatcagccgtgtatcaaataaatcccggaacactacactgtcttccggcaggactccggactcatgggcataatccaacagctctttcagtgtctcctccaggctgacttctccgatttccgtctccggttcaccgtactcgtccagtttcaggacatccagaatctgattcgtcgcataaatcctgtcctcttcctgaatcagccctgtatcaagaccgtattttaccagttttttaatcgcttcatttaccataccacgcctcctgttatcaatcatgtgcaaaacacatttactttatttcccaatccgcccggcggcctgagtctccgacggaaaacagcgccagctttctgcggtgaacgcagaaactgcaaatgcgcagatataatgcccgctctgcggacattatatcatgttcactgcgttcacatgagtctccgacggaaaacagcgccagctttctgcggtgaacgcagaaactgcaaatgcgcagatataatgcccgctctgcggacattatatcataatcacaggtgtgattccagacgttttgttacgactccgccgagaatgcctatcagggcgcccgctgcggttcctgccgccagcaaaaacggcagatagtaaaaaacggcgctgttttccacgacgaaggccgctacacaaagctggccgacattatggccgactcctccgatgatactgattcccaattggctgaaccaacctctttttttgcagaaaatcatcagtgcgagactgagggcgcctcctgccagactgtaaatcatcatcgccatattgccatacgcaaaaccggtcagaagaacaatccttgccagcgcaatggcaatggttcctcctgttcctatgaggtacagggatacgatattcaccaggtttgccagtcccagtttgactcccggtattccgaggctgatcggaaccagtgtttccacatagcctaacagcatggccagtgagagcagaatgccatagagcgctatcttcaccgcctgccggtcgcctttgcgggtttctcttttataattcatagagggtgtcctcttttctcaacctgcggcgtcctgttacgggttgacgcctgtttctcagaatccatacgggtaaaaatctttgatgcggactttcaccgataccattttatcgaaatgaagaagttttgtaaagcagaacaataaagcactttcccccagtaaccgttcagccatggtgtgtaccgcggggtgttttcgcttcttttcgccgtttctgtgcatcatttagatttaactgaggtttggaggacgcgtccggaacggaccatgtccggcgtggtgagggggctggctgagtcttccgtccccgcgggaggttggtcgtggagggggaatccggccggaatgaattgctgcggggaccgtttgcactctttggagcacgcagcggaatgctaagctcgtgagggacctcgctaagcaccggcggactcccatgtcccctccgcaattgattccgcctgcttccccgggtcagatttccgccggggacggaagactcaggcaaaggttttcgacaccggacatggtccgctccggacgctgattgtctccaaccttaaatggggagggccctgtcgcagccactacgtgtttccgcaggcagatatcaaatccagcgcaattctttcataaaggcgcattgtaggcataccgtattccccgtacacggaagcgctgagcggcctcgacaaggtctgccccgcgcacttaacgcgtgagacattcagcgtccgctggccataccggcggcgtcctcacctgcttaactgtaacttccctcatgctgcccttgactttaatttaccgctttgttaagattggtatgtttcacaacaactgacgcacagcataacaggaacataaatactatggaaaaaaaacaattcaaacgactgctggccgttctcgttttcttcattcttgcctgcggcgccgctttagcactcaggccgagaaagacggagcccgtcagccgctccgattttttgctcaatacgtttgtaaccgtcactctctacgacagcagtgatgaggaaattctggatcagtgcatggccctgtgccgcgaatatgagaacagattcagcaaaacaattgccaccagcgaaatttacgggctgaatcaccggccggcaggagaaactgtgttcccccttaccaaagacacggcggccctgattcgggaaggtctttactacagccgtgtttcggacggggctttcgatatcaccatcgaaccgctcagctccctctggaatttcacagacggtaaaaaagtaattcctccacaggaggaaatcagtgaggcggcctcccgtgtcgactggaaaaacctgaggctggatggcgacgtactcaccttttgcagcccggacaccaccatcgacctcggctctattgcaaagggatttatcgccgaccggctgaaggaatatcttgtaagcagaaatgtaaagagcgccatcatcaatctgggcggaaacgtactctgcatcggtgaaaagccggatggcactccgtttaaaatcggactgcaaaagcccttcgaaggacgcaatgaaattatttccaacctgagcatcaatgatatgtcggtcgtttcctcgggtgtgtatgaacgccattttgtcgtggatggtaaaaattatcaccatctgctgaatcccgctaccggatatccctatgacaacggcctgattgccgtaactatcgtatctccacgatccgtggacggtgacgcgctgagtaccacatgcttttcactcgggctggaaaaggggctggaactgattaattcgatggatggcatctacggttattttataaccgacgactatgaaatccactattctgacggagcgcaaaagcttgtgattcccgccgcagactgactaaaggagttttatggaaaataaagaaaatagaaagagcagaaatgaactatacctggtttgcggtcttcttgtctttgccgtcattttcttcgcagggtaccgttttctaaaccgtggtactgcttccgtcgcagtcgtcagcgtaaacggacagacactgcaggaacttcctctcgatcaggatgccgatctgataatcgaaggcgtgaatgggggaacgaatcatctggttatccgcgatggggccgtttcaatcacagaggcctcctgtcctgacaagatttgtgtccatgaaggggcaaagcgtgagaaaggcgaagcgatcacctgtcttccaaataaagtcataataacaatcaagtgaccattgaagcagaggacatattcctatccggatacgttccctgcttctatctttgtccggttgtccttgtatttttctccagccagatatattcttaacaaatttttatattaaattaaatttttttattctttgtattcttttcaaaaaataagtaattgtttgtttccccatgtttttttaagcattattcaattttcctttaatttcatttagtcctatgttttttcacatcaattcagaaaatctttaacatattttttatttgctattctgtctctcagcgtttacaatgtaagcatcattcaccattctgagaaaagaaaaatattagtgtatgggagggatctcacatgagtgaagttaaggtaatgtttaatacgctcgaagatatcagaaaatacctgcgtgctttggatagctttaatggtgatctggatcttcagtatgaaagccagattgttgacggaaagtccctgctcgggatattgagcctcggaatcggaaaacttttaaatctgaagctgcattatggaaatccggacgaactgatggagaaaattggattttgctgctgccggtaaacagcagattccggaaaccgtgcgccaatgtccgacatggacgttttcatgccggtatcaaaccggaaaaggaaggaaaacagacagcatgactgtgatttgatgttacagccatactgtctgtttttcgttttttatttcctgtcaattcgttccgttacttccgccatcttggataaatccccaatcagaatcgctccctttaactggccgttggcatagtagtatttttcatactgtttcctggcctcgtctattttctcttccgtgcggtacgacaggccccgctctttccccgtatcgccaattgcatagagcgccgtattcattccatggaaggacaggcccatggacggcggttcatagaaggtttcttcaccggccgcattggctccggccgttttgccctgggccgatgcctctccccagagagcatagttcatcccctgatactgggcgcagtctccgcatgcgtatacgtccctgacattggtctccatcttgtcattgacaacaactgcgcggtcaacggcaattcctgattccatcgccagggccgtactcggccggattccggcggagataatgaccagatcggccggaagtgtctttccgtcggcaaggcgcacgcccttcttcggctccagtatttcgtcagcctgcacgcctgtatagatttttatcttctcccggtccgcaatttctttcatcatatcggaggccgcctggtccagctggcgcatcatcagccccggcgccgcttccaccacgctgacgtcgcggccggattttctgaattcccacgcagcctcgagccccagaacacctccgccgatcacgcagacactttttatatccggcagcatttcgcatattttctgtacatccgcaagacgtctgaccgcggcaacatgctcctgtccggctccccggatcggaggaataaagctctctgcgcccagagcataaatcagctttgtataaaccatctttgttccgtcttccagaaccacctgtttaatttccgtgtccaccgaagccacacggcggcccagaacccggataatattatgcttctcataccattccggctcatgaacagccgtctgctccggtgtcaggcccgccagcatggattttgtcagcatcgggcggttgtaggtgtcataaggctcgtctgatatcatgacaaccgaggcagtcttatttcttttgcgtatttcctccgccgcagacagtcctgcaatgccgttgccgatgattacgaaaaagtcctccgtatcgcggcaaaagtccgtatcctctgcgtccacctccacaaaatactcccggccgacgccgcatacaggacaggtatccagggaggaatcaaagatttccccacagacaaggcattttaccagctttctggcccctttagccgttccggcctggctgtttttcgactcttttccctgaacgagacagccaaaccggtaaccgtattcataagcatccatcagggcaacctcatccggcttgaattttactctgaagccgtcatcaggaaccttcattttcaactgcttcagacggtcgatgatgtgcgggacaccttccccgctccagccgtagcttccaaatgcagaggcgtattttcctccatgcgtggccgggaaaatcgatgttgtcaaatcccatatcggcttaagcgcttcccccacaatcgtaggagtgccgaacagtattccgtctgcaaattccagttcgccaaccaccttcgctgcatccgtctccaccatatcataggttctcacgtccacggggccgctgtcacggattccgccggcaatcttttcggccagctcttttgtatatccataggcgctgacatagggaattatgactgtcttcttgttgttcggattggtgacggtacaccactcctcgtacatcttaaagatttcccctatttttgtgtccagcaccggtccgtgccccgtgcagatcatgacagggtccagttccttcacacgcttcagcgctttcatcataaatcctttaaaaggcccgattatacagtcaaagtaatatctggccgctttgttgtaattttcctcgtttctgacttcgcttctgagcaccccctccacaccgtaatgggctccgaaggaatcgcaggttacgagtatcttatcctcctcaatccatgtatacatcgtatccggccaatgaagattcggtaccgtcatgaacgtaagcgtcttgtccccaattttcatcgattcattatccttaacctggatactgtagaaatcccggtttacaatgtttttcaggaaattaaccgcacagccggttgcgatgattttcatgttgggattgatgtccagcagaagctccacactgcctgcatgatccggctccgtgtgatccaccacaaggtaatcaatcttttcaatttccgtgatctttttaagctctctcaaatactcatcgaagaatttagccttcgccgtctcaaaaagcaccgttttatcccctgttttaagtacataggagttatacgtggtgccgaattccgtcagcataataatatcgaataccctcaggttctcatctattattcctgtccagtaaaaatcttcctttaattttatggtctgcatacactgcctccttttgccaaactatataaaatagtatggcaaaagcggctaaatcctatgtattgctttttgaaccgatgacacaaaatcttttaaaaacagctctgtattgacgtcaacacagacttttaccgttttttccctctgtttgatccgttttaaatcaccaatggtcctccctctcgactctccgtccgtctccgcggtcaggttgagttctacggtctccacaaattccggatgaagaacggcggccacagccagcggatcgtggatcgccccctcccggctgccctcatctcctatctcgtgggagcagtaataatgtaccatcgcagccattttgcatcccggttcattgccgtccgctgtccacggccggatcctctcttccatggccccggcgctcatcatcgttttcagagtcacgtcgagccctaccatcagcagattgattccgctctccaggacaaatttagcggcttccggatcggccagaatgttggcctccgcaaaacggttcacattgcccggaacggtaactgcgccacccataacggagatcctccctactttggccgcctcctccggatattgcctgataaatcgggcaaggttggtcatggctgccgtcgctacgataacaagctctttgccatacttttgtgccatctccgccataaaggctgcggcatctttttcttccgctcccttatctgcttccggcaattcgatttcaccgattccgtttaacccgtgaacgcgtttgcagacctcgttcggaacgaattcttttcccgtaaacatctcaggtgctcctgcataaacaggtatttcaccggctccgaagagccgcaggacccgcagcgtattctgaaccgccttatcaaccgttacatttccaaaacaacaggtgactcctataagctgcgcctcttcggagcccagagcgtaggcaattgccagtgcgtcatcgattcccgtgtccacatccagtatcattttcatatatgttccatccttccagatttttaatatcctctttctttcaaatcatgcaccaggcgtacataaaattccctcacatcaaagtccctgatattctcccgattcaaatctatcatgtcaccgtgggaaatccccctgtgttctttggtcgtaagcattgtataattgcttccccaccggaatgagtcctccgctaccagaccatcgttggggccgtcaaaatattttaccagacgatgggaaaagttcagggggaagcggcctcccgaagcaatgttcagcctggatccggtactctgatagtatacttccggtttatccggcgtctcttcattaaaacgaaggcaggaagacgctcttaagtcaccgactgcagccagaaaatccgggtcgggatctcccagctttttaagggccttgttgtatccgtcggcagctttgtccttcaccccggccggaatcttatccagaagataatcagcgaacaggcatcctctgtggggcgtattaatcgtagtcagcgtcgcgacgtacggctccattcccagcaggctgatcgcatatctgctgtccagccctcctttggaatgtgcgataatattcacctttccacagccggtttcaccggtaatctccaaaatacgtttggcaagctcctgcgcgctgtctttaactgaagcggcagactggtggtttccataaaaaatcacggctccattgcgttccagctcctttggcaccctgccccagtaattgaagtatttaaaatccctgaaaaatactccgtgaaccataaggagcggatacctggttttgcagagctgttcctgttcccgctcacggttcaacaggatttttccgctctcaaaggctgtttcctccgatgcaatccttatgatcttgcacagaacaatcaggtttgctcccggaatccatccacagataattccggccattctccatttaaagccaatctgcagggatgtgccgtatacacggatgattccgttccagaacacaaccgcctccgcaagtatagcccagataaggccggcaaaccaccgcggcgcatgctcgggccaaagagccgggatccgcgtcagcagatacaggcccgataatacggccgatatcagaaagagaatcagcaactcacatccgtcagcgcagagcctgagcctcctgtccggcagccgtctgttgacataggaaggaaatacattcagcaggaaaaagcagggtagcagcagccatagccactgcgccccatgagactgaaaaacaggaataacggctgtcaggaataagacagccgcgcttaatattcgtatgattaccttcaacctttctcctccccgcttccttataccggcactctgtatgtaagcatattatacctttatcttctcccataggcaaggttctctgcatgcttttcaaacatatcctagcgtgggcggaagctgtaataaacgcctccgttcttcactccgccccggaaacggatcaattcgctcacggtcacaagctggaatccctgttccgtcagggacggaatgattctcaccgccgcatcgcccgacgccgtatacagctcatgcatcagaacaatatccccgtccttcacctttccgattacagcctggactgtcttgtccgcatttttggtcttccagtcaagcgtatcaatattccacataatcatcgggtaattgacgttacctaaaaccgtgtcgtttttatttccgccgggcagacgtaccagtctcggactctcgcccgtcacggctgcgaccgcctgattgcacagctccacctggcttctgatttcatcagcacccagcttattaagatacttatggccatatgtatgatttgcaatttcatggccgttatcatgcattcttttaatctcagtctgatattccgccacacggtttcctaccacaaagaaagtggcccgtccattatatttctccaggctgtccatgatccggtttcccaccggggcatatggcccgtcgtcaaaggtgagggcaatcatcggcttagacggatcgatataccgtcctccgctccagacaagacctgccgcttccgcttctttctgaatttcttccgccagtccggctgccgcccgggtttcctgagccgcctgggtttccagggccgcctgagtctccgggaccggctgagcttccggggtctgccgggtttccgggttctgctgtacttccggggtctgccgggtttcgccctgtgtaaccgccaatacggctccttccccggcctgcgtcgattcctgtatctccccggccggaggcatgctctcctgcttggcttgtccttcttcgctcatctgtctctcctcgacagtcctgttatctgatgcagggcctgaagacggagcgccggcataagcggccgaagcagccgcaacaatacagccggttgtcagcatgagcaatgctatctttcttatccttcctgttttccgtctcataataaaaactccctttcttccgttcttatagttagacggaaaagaaagggaaaaagtttcatttatttttttaattacccggatgcccgctgccgctgcctttccgcacggtccgcacagcaaatgcacagacatgtcaaaactgttacatccgcctgaccatgacatcctcaccgtgtatatctttttcaccgttgaaacggaaaccgaattctttatacagcccggcagccacatcatttcctttaaaaacgctcagatatatatccttattcggatatctcccagtcagaagctttagtaatccggccagtgctgcttttccgtatccccggccctgaaatgcggcatcaatcatcaggcggtccagccacagacggccatagggaaaatattcccaccaaaaatatccgtacatggcaaaccccaccacccggtttccgtcgcagatcgcgactggtttccatacaaggtttctccgtgcctctgaaagacactgtgaaaccggctctataaaattctcctgcccttcaccgacttccagccgcaatgcttccaaacggttttgccgggttatcggctcaaaatgtaaattcaattatagcaactcctaactcgcttatttgcttgtgttaaacctgcccgaataaaaggcatctcagtagatacagcgccattatatgcaccggataaaaccagtaaaagaaatacttcagacggagctttcctctctccccattataacgggcaatgggaatcagggccagtgcggctgccccgaacagggtcagagactcggcggcggcaaggattccggccagtataagttgagtggttctccggttccttaagagatagaaagacgcgatcattaaaatccccatatagctgtagtcgcttttcagcaaaacggaaagtccgcaggcggccgcaaccgccgctccctgtatcaccggccttccggcatattttttaagaaagcacatcatctctacacctaaaaacaaggtaaaatatacattttgcgcccccggaaaaaagagcctgccaaaaaacgcgagatcgaacggtatctctgaaatcagtgcaaacagaagcagattcctggcatatttggcttcgtttcccgtatgcgtaaagccttccactagaaggaaacaaaatatgggaaaggccagccttccgatgagccgtagtacgatgtccgccagataccactgcattcccctttctgtctccagtattgccatcatacgagccatatcattggaactgagaatcccggtttctatgactgccgctccgatgtggtcgatgagcatggtaaaaatagcaatgagtttcagagtgtttccggtcaggcccacttttaaagtctttctcatatctgtcattgttttagtccctttgtccttctgatacttaattgaccggtatccatccgttatcaattgtttctgatttaactgtactccagtttttattcataattaaacaggcatttcccttggcatcacggtaccattgtttgctgtccggatcgtaaataaaatatgcctgccacttttggccgctaatatcgtccttggaggggccgatatatgcaaaaacactgtctttattcgtatcggatatattccctcccgatgtattcttaacattaatatatggctgaatatacaaatctcccccgtaattcgcgccggtaaacaagctcttgtcgactttcggccactggcctccatacacctctttcaaaagatactcccgtattgtgtcattccgaatgctattcgtcggcaatccggcatctttaaacattttaataatctcgtccactgtatattcttctgcaaatttaagaatcgtattgtaaacaccgtccccaattgtaattttcggatcgctgcttaccccttcgctgttcccgtgcacactgcagttgacgacaaaaagctcatcccctgtatgaataatggagtattcgcctttcgaaggacattccagccctctgtttttgaccatgtcatccagcactttttccggttttatatccctgtcctcaataacggcaacctgatattccgaaatcacaacgtccacattattcatgcagaccgcttttcttgatttttcaatatacttcatgaactgcggagccagaagcccggtcagtataataagaattgcaatcgcaattataagctcaatcaggctgaagcccttatctgtatctgtatttttccccatgctctttccctccggtaagccgcctttttagaccggtaaaaggcccgctgagcgtgccaatcattattatcttaccatgctccggcataatattcaaattgaattattatttgctccacgcacaggtcaccgccagtaacagttcagacagcatgaactgttactggatccggcgcttattcaatccgaaatgtgtagtctgtattataagtccttacatataagatattgtcttttaaaatcagatagtccgcctttgattttaccgcagttttgtcaatcaccttgcctgaacccagatccagctggtaaatataatccggctccgccgtaaatccatagccgcacagcagaacatctcccttaatcacaaaattggccgcgttgctcacaagaggctggcttttccacagcaattttttctccgccagatccaccgccgccacataagcattgtggggtgaggattcagcgtaggtgagatggccgatggacaaataaaggatatgatcttttacctgggcataccggatctgctgtctgacgaattccttttcactctgcttaaaatcaccggcatactcgaaatcgctgaaatccagctcaaaaacttcacctttttccccgtccaccacctgaatacggcatttaccgccgttttcgtccgaaggaatccctaagccgtatttaccgctgtcctccacattaaggctcagattgtttttttcaaaccaatcatccgtatcagtaatctggttggcttcttgcgtgagctttgtcagctttaacggtgccgccaaagaggccggttccgttgcacagtagtattcccatgacggattttccatatgaatctgtctgattgctcccaaatctgcaggtgccgccatcgagatattcttctcctgtgaactaatatccggctccggcatctctgtggactctgccgccgtatgattgccgcagcccgccagcaacatccctaaaataatcataaccgcacatcccgcgttacgtttcattttttccttcctccaactcattttttataaacatcatgataaatcctgcaaacatcagcgccgccgctatccatatggccctgttgcccagtttgattgaaaatacagctccgattgcagccccgaccgcaaaaaccaggattataaaatagtagtgaaacgccttcctcttaagctccggctccctggtaatatgatacctgccaagcatctccgtggcgctcctcatatttccgatacacatcgtggttgcgcaggggattccccggaacttccggaagctgttaacctgcatcgcacaggcaaaagacagcagaacattagccggggtatccatggtatgcggcagaagtcccgccgtcatcagaagtacgatttctataaaaaggacgatctgtctccagtgaagaaggcggtgttctttatacagctcacgtatccactccgtcacatacacgcctccgataaatgccagaatgggaagcagataccttacggcgctctgccagtttcctgtcgccaggttctgtcccagcagcacgatattgcctgtctgggcattggcaaatacctttcctctgcaattatacgagtaagcgtcctggaatcctccggccagagtcagaataatcccaagcgccagcgattccgacatctgccatttacggtctgtcacccaatcggatatccgtcctgccatatttctctccccttcgtcatgtcatgccgttttggggtcattataccgcattttccttctctttgccataaaaaatttccgcactgtcccgggaattctgccggcgggtaatcattcccgatttccacactccccctacggaaatgatgcaggttataaactccgccagaggaaaggaaagccacactccattcattccgaatattcttgaaagaaccagcaccattggcaggatggcggctcctcccctgacaacggatatgataaaagccaatttgggctgcataacggcgctcaggaaggccgctgccagaatattaatcccggcgaataaaaatccggtgaaatacagtcttattccgcttctggctatcggtatcagcgcctggttcccctcgctgttgaatatatgtataatcggatctgaaaacaggctgaccactatgtaaacagataccgccagtattacggccagtcccgcggcataccccagtacctgtcccagcatcttcttatcatctctgccgtatccggtgctggcaagcggctggattccctgtgcaatcccagtaaataccgcaataaccaccaacgcgaggtttgcgacgattccataggccgccacccctgtatttcctgcaagtccaatgataacgagattaaatacaatcagaacgattccggatgaaacctcggtgataaacgatgacagcccaggcatcaggatgtttttgctgcgccccagggcgggacgtacgtttttaatccggaatgtgttcttctttttaataaaatgcagtgacaatacggccaggctcatggccggagccagccccgttgcaaatgccgcgccgaaaatccccatggacagcggaaacataaacagataatcgagaatcacattgccgatgcttccggtcagcatggcggtcatggacaaagccgggttcctgtcattgcgcacgaatgccaaaaccacattgttgaggataaaacagggggcaaagcacaaaatcaccttcagatacgtatctgtcatctcgaacgtttctttgtccgctcccagcctcattgcaaccgctccggaaaaaaacagccccagtgcggcaaatattaagccggttataagccccatcaccgcagtccaggtaaaaacgcggcttgcctcttcgtcctccctctgtgtcttgagtatggcgaagcgggtcgcccctccgattccaaacatcaggcctgtggcgctgataatactgtatacagagatagccagatttaaggatgcaagccccgacgcccccaatgcctttgaaacaaaataggtatcggctagtatgtagcaggacaggcctatcattcccatcacattcaggctgacgtaacgggcgaacagcaccggtacgctgtcgttttttcccccttctttctttctcttttttcttgtgcggatcattttcttactcctccctgataccgttaagcaaaaaagtgcctgaacacgctccttctttgacctaacggagtatgttcagacacttgattatttacccggtggcaaataacggtgttttttgttttgattttttaataggatagcacagttttttctatttttcaagttcaatccacacttggtaatttaataatattgacaccgttattgaattttaataaacatggcttcttccggaatcttctgcatctctgcatcccagtcttctttcctgacgtcctgcacggacacggaaaccaccgattcgctgactcccagctcttttacaagggtctctttcattttcccggcaagcgcttcctttgttttatcatccctgcccgggaacattgtaatggctatatgtggcatattctatccttcctcactatcaataaccgtagaaaatctgtgttatcggtgaatctttatccagaatcaatgtattgttcccgtttttcagggataccttcgcagcgtccagggaacggacaaagttatagaaatccgctttgctggaatcattataggcgtttgaaagaatctgcatatactgggcctcgccctctgccttaatcttctcgccttcagcctttgcctccgatttcataaccgatacttccttggtcgtgttattttttatcatctgggcagaggaattaccctgggcggaataggaagctgcaatgttattgcgctctgaaatcatacggtcgtagacggcctgcttattgtcgtccggcatatcaagtgacttcgtctcgacagccaggacagtgatcccgtatccgtccagcgcattgctgatattggcgctgatatcctgcgccagcttgccgtccctgttctcaataatctcagcctgatccatattggagatgaccgacttcatcgatgagaagacagaagccgaaattctggactgggcctgcgctacctgaccgtttaaatgtcttgtgaataatacgggatccgaaatcctccagaggacaaaggcgtccgcgatcatgctcttcttgtcctttgtgataacgtctgatttcggaatatcataaatctgaagttccttcggtacggatgcgctctcctggataaacgggatcttgaaggataccccgggagcctctacaacatctacaatctctccaaactgcttgattaatttatactcattcggatatgtgacaacaatggaggaagccagtactacgactgccgcgattgctgcgaaaacaccgattatcttactgcctgtttttttcatgctgcctccttaattaccctgctgctctgtgttctgtgtctgttcctgacctgctccggctgccggctgctgcggtgacggaaccggctggctgccctggcctgcaggcatatccatgaagctgtccaaaggaagcatcttctgtgttcccgcttcatccacaatatagactttcaggctgggaaggacatcctccattgtctcgtagaacattcgctgctttgtgattagagggtatttactgtattccgcatacatctgttcaaaacgcgatacctggccctgggcctcattgattctcgactgcttctctgcctcggcctctttaattatctgatcgcattcggcctcagcctgcggaatcttttcgcttctgtccttattcgcattgttgatcgccgtttccttgccctgttttgcattttcgacgttcttaaaggcgttcataacctcttctgtaggcggaaatgcatcctggattgtaatgtttacaacagaaagcccgatatcctcctggatcatacggttcgtaagcttctccttaatctcggactggattgcggccttgcctgtggtgataacatcgtccacggtatagattccgaccgtatcacggatgtaggactgggccagcattttaagtgtagcctcagggtcctgggatgcatagagatatttaaccggatcgcttaccatatactccaggtagaaatctgtattgacaaagttaaaatcctttgtaatcatgactgattcttcgtcgatggatgcctttgtctcaatgtcgtagccgattggcatgcctgtgataattttcgataccagcctcacattctggacataaggaatcttaaaatgaagccccgcctttgatactgcctgaggatttccgagggttgtcaccaccgcataattatcctcatcaaggacgtagtaggaattcattcctgtgattacggcaaaaatgacgatgagcgccgccaccatcctcttatagggaggtttcttcctgattttctttccgttgctgtcgtaggcctccggctctttctctttttcctttttcttcttcagcaagtcatcaaatgggttctggtttccaaattgattgccgccaaagggattcctgttagtgtacattttcactctcctgttcttctatctgctgtgaaatatctgtccttcgttcaactatccctcgttttgctttttccgctcctctctattctatccttttgtgcatgctattgcaattacattttttaacatatccttaacacatattagtccgccccctgaaatcaccgcattttcacagggatcgccaattttttcgtccgctgataagaaggattggccaagcgcagctttacctctttttccccttcctcatagggaattataaagccggacagccggatgccatctccgctgtcattgcttaccggttccagggctttgtctgaaaatggcgggatatccggttccaagtcggcttcacctttaaaaccacggatgtaataaaatcccacgtcagggttctttgacccggccgagatatcgatgcggagggcaggtttcatgattttctccccgctctcatccgttcccgcttccctgtcttttatgcgttttccggtcagcgtcagaacggaatccctaaactctaccttctccggggcagattccccgtctccggtatcccgaccgtaattacatctgagatttcgttggtcgttacatacacttccccggtaaaaatttctgcttttttcaatttcccgccttcctgaagcgtatcatccggaatacggtacaggtactgcgtgctgtaaccctccatgagcccttccagcttattattgactgaaacaatatgctgccgtttgcccggctcaattatttcccactccccggcttctttagaatctccttttacttcctctctgtatctgagccccgttcttccaaacgacaggcgggaaccatccggcgaataggaggacaccgaaaccatcagaccgtcctctgtctccgcccctaaagccaggatataccatccgttttcatggaccattccctccacgtcttccagggatgcatattccggagctttttcaaattcaaacaccagcggttgatcaaagccttccaccataagtttgtagagtccttccggcttgtcctccgtaaatccgatcgtgtccgaatacttgacacactggattgtcattgtgcccttctcaaaaaactcttcgtaagacctgttgttaccgcctgtgctgaagcgccttccgccagttgctattccctgcccatagattctggcatccgccgtatataatttatttgttgcatcttttaatatacctgcttcaaatgcgctcctgccgtatattcctttctcttcatccagcctgatataggaaaaatcccactccgctttttctcccttttcttctttttccctgttttcccgttccttcctgcgcaattcttcagtctctgcctcggacagaacctccacggaataatcggtaatttcataccgcacaatcaatttgccgttctgaaatacagcatctaaaagtctgagctttgccatgccgttctccgcttccaggcggacatcggcaccggagacatccttatgggccatctgatagataaccggactgcccggcgcacatatcccgtaactgtccgtcagctggaatccccgtgccgtcgtccctgtctctcccgcctgcgccggctccgccgcacttgattccggtgctttgtcctgctccgtcaccgtcggcggctcagacaatacccggtctgccggaccggcggaccggcgtttgccgcagccggaaagaatgttgattgaggacaagagtatcagcgcagcagcgcttaaccggattattttctgtctattcatacattcactccccttcattctaaatccaatatggatcattttcgcaattcttcatttccttctttatattttaacatattctgacatttcacttattgcataataattaatgaattcttacagtttcctgcaggatatcagttcggcgcccaatacaggttcggaaacgtttcgccgccggatgatctgatgcggcggacttatcgtgttatgaatcacaataagtccgccgtagaatagacggtattcgcaggttacagcagggcctttgtccggcggtacagctcccggtatttcccaaaggctgactcatatactgccgccctctccttatccggtttatatgtcctttcctccatcgtgacaaaccgcctgcccgcttcctccaggctcttaaaaatccccgccgaaacgccggccagcatacaggctccgagacatgcctgctcagaaacgcggcagacctgaatttcccggttaaatacgtcggcctgaatctgaagccacacaggacttgcggctcctccgccggaagatatcattctgctgcagggattaccggcctgttccaggatctccatcgaatcccgcagggcaaatgtgactccctccatcacggcccttgccatatgctttgctgtatgggacagatgcaaaccgaagaacatcccccttgccgccgtgtccatatgaggtgttctctcacccgtcaaatagggcagaaaaatcagtccttcgctccctgacggaatctcaccggccatctcactgagcttttcaaaactctgctccctaagaatattgtccttcagccatttaagcgacataccggcattcagaacggctccgtagagggtccaggctccttctatcccgtgacagaaggtctgcgtccgaagcgccggatcaaaggacggctgtccgcaaaaggcggaaacctggcctcccgtcccgatattgcagataaacgttccctcagagaagacaccgtttccgatgctctgtgcctgctgatcgcccatgccgtaaatcaccggaaccgattcaccaagcccggtcaggcaagcgcattcacggcttacccgcccctgaatttctcccgactcatggcactccggaaaaacagagggcggaaagccgcacatcctttggagttcataggaccaatcgcgttttacgatatcaaacatcagggaggccgacgcatccgtcacctcagcgccgaacattcccgttattttataccggatataatcttttggctgcatcaccttatggatcgcggcaaaatgctccggctcatgctttttcacccacaaaagggaaggcagggcaaacccggtaaaaatacggtttctcaggctgcccgtgatcaagtcctccggaatccgttcattcagatcgttacattcttttgttgaacgctgatccagccacaggatcgccggacggattggccttccgtctgcatcaaccatgacaagcccgtgcatctggccggagaaaccgattcccgcaacttcactgtagcatttaccgtatttttccctcaggcgcgaaaggcagcaaagcacggcctcccaccacacatccggattctgctctgcatatcccagccggggtatggagacttgatacgtctcgctctctatgccggccacccctgttttttcatccagaagcatgacttttgttcctgaagtccctatatcgattcccaataatgacgccatccgtactcccccgttcccttttgtatcatgttattaccgtttcgcgccgccggactcgggattttcgcgaaaaacagcgaaaacaccttgcaaaatgcatcatgtctaaactgttgccaccgccctgcctctgatacggacataatctgaaaaccattttccgtcacggaacagcttgtccctcagccgttcgacggcatcggcaatgatttcctttctcatcccctcatccaccccgccaaaaggcgtcctgataaacagatcgatccagtcgtaaagaccgttatctccttttaattcggttggcctgtcaaagagaagggcatactccacccggaatccggcgcgctccatcagggaagcgtactcaccgattgtcggaaaataaaagggcattttatattcaagaccgcgggcagcaaatgcctgtctcagcccctcatgggtcagggcgttattttggctgcccccaaattcaaagacaaattgtccgttttcattcagcgcatgatagacgcagcgaagcaaatccggctgcttgtcctttgcaatccagtgcagcaccgcgttggaaaagataacgtccaccttcccaggcagctcaaattccgttgcatctccctggtaaaaggtcagctccggataattcttcctcgcgatttgaagcagctccgggatgcgtccagcccggacgccttaaatcccagctccgacagcttctttgtcaatgctccgtttccgcagcccaaatccaggacagaagctccctcctcccggttaattaacccgattacttcattgccgtattcatggacaaaggaaaaatcctgtgtgtatttgtccgcgttccatttgatgttcatctttttgtacctcctgactgctgcctttccattttaataatgccggtgtcgatatcatcccgtatactgccgtacttccagacagtgagggactcaatcctgacgacggacggatgacttattgctttcagtccttcaaagatttcccgatacgtgtcatcaagcgcaatatatcccggttcatcaaaaatatgaaggaactgttcttctttcactttattatgctccggccagaatttagctgccttatttccttggtattccctgccggataattttttataaagtgctttcatagccagaaatttgaaaccgccatactggtctctcgcatcataaaaatatgctttcaaaattcccttcgaaatatagctgataatattgccctcaatcatatcagaaatctcacttttcgaaagttccgctttaaaaagatataagacattttcttctaaatcgttcagatttatcaacggatatcctgcgtatccgtataccatgacaactgttttataccttccgataccttccagcgtctttctggagtaaatgccaaatccctctttacagaagaagagcggtatattacacaaatacttgttatcgcagttatatctcctgatattaagctgtccatctacaaattggttccttgattcatatagctcacgaagccccagtttaataaaatgctcctgcaaagcggatagcacgggggcaggccgccgactatcctgtttctctccaggtttaactgaattgaatttccatagctttttatcgatatgtaaggtttcagcgctatatgtctgcacataaagtcatagttctcctgcactgtcaatccattcaggataatctgccctccatagttttcataaagatagctcacctccgtatcctccagcggcgtctttacttttatccaattgtgtccgcttcctctgagacagcgaatttctctcctgacaccatttacgtataattcaatcgggacgtcgggcagtctgtaccacaaatccagctttaaagcatttatcaattgattggctcccatttttgacagactgccgtttaaatctaccataacttccgtaccgtgggtaaaactgctgtcctcttcgattgaaatattaatgctgctctctctgtttgagctgaatgaatagaaaaaatgataaagatgtttttcaccataaggttttgtcctgacctccaccgtgtctcccaacaggaatgcagccaacgcaccgattccaaactgcccgaccaaattcaggggactgtcttttttcgagctttcgccgatgacaaagtacttttggagcaaaatatccttagtcatcccaattccgtaatctcttacacatagctttttcataccgcctgtctcttttaacagatacacttcaaccggttttcccgattttttaccacagagggccgccagttctttcattgcgtcgcatgcattctggattatttccctgagaccgcattccggtttgtcgccgtacagcggtttaatcagattgggaatgatttcatttgatacactgaatttaacatcctccgtaaagaacggagcgccggtaagctcctccagatatacattattgaactggaagaaattgccgtactgagttgcgcagttcaggtacggcgccagttccttctgtatctcctccgcccttttttttgcctgtttatattgcttaatggttgtaatttcagatgaatacttcagtttcaggcccgtgttgacaatctccgccagcagatattcttcatctgtatccaaatcattatcattctctctcatcctgaaatgacggatgactgccgcgatacagaaaataaccgatttatagccgtcatccagaaaatccggacggaattcatcccggctgcctgcgctatcgccgacaaagccggccagttcatcatatttataattcgctccgccaaaacgctgccttaaattatctttattaaccataaattgcaatacctgaaataccggctttaattccggtctttcctgcaccttcttatcacaataaaatttgaggggcgcatcaaagatattgtaattaatctgctctgcattattaatcgtcgagttatccttcgccgtctgatatccgatatggttcatatgaattacctgtaattatgattgatgattcctgcattcacgatagttcccgagcccgtattttcctgatgtccgattctgacggagaccggctgcacgtttccatccctcatctgctcaaagcttattttactggcctcaatccactgttgaaattccgctatgaagtcttcatcgggattttgtgcataatcctcataaataattttcacgtctttatatggatttttcctgctgttgggcgtcttctccgccagctcttttaaaaattcttcgcaagcctcttccccggaaaatctcttcttttcccctgaagcgaatctacttttaaacgaccggataatttttgctccgctgtgtttcaaaatatcccaggtaagccctcccgcaatgcttgagccggtaaatcctgccagggataataccgcttctaagatagtcatttgtcccattcccttctctcttttgtagtatatgtttcattacttgccggatttctgaggtaaacgataacctgacgctccgcgcacaggtcaccgccttcaacacagaaaccgcttaaacgcgatacggcaatcgctctgcggttattataacataaacagagacacagggacagaagagaatggaaaacggtgtccttcttcgtaacagtacatccatgagtattccgcaaggtgttttcgctgttttttcgaaaatcccgagttatgcggcgcgctctgcgcacaggtcaccgtcgtcaatgaaaaaacaggctccgaagaacctgctttcctaatcttttattccgggcagcattttgtcttttcccatctctgccagctttctgttcttttcattgagtgtcccgaacgtttcaagacagcagatgacctgactgcaggaatttaatacagcggcggccctctcaaatgtctcctcccgtatcggttcaaacggtgcctccgaaaccacctccgacgcaagcgccctggccaccggataatcgatgtcattctcgctcaggattccggctgcgaagggaaccccctgacgctgcagtttcctgtaaaccggaatcccgcttccgcccccgccgatgacaaaaaccctggggactcctctcaccggctccatttcgagacagccgaattctgcctggtaactgcctttcgtgatatcatacagctttgtgatataagattccgtaaaaacttcctccggcgtaccgcagcgttctatcctgtctccttttatgcagatgatataatcggacagtttctgggccagatccagttcatggagcgacatcagcacagccaccttttttgtccgcaccagctcctttagaatggtcagaagctccaatttgtgcctgatatccagaaatgatgtcggttcgtccaggacgatcgcctccggctcctggcagactgccctggcgaggagaatgcgctgcctctggccgtcgctgatctccatgaaatcgcgctcagcaaaatcccgggcatgcaccagtgcaattgcctcccggaccttttgcctgtccttctctgaaagaattcccagtcttccggtatagggataccgtccggtggcaaccacatcttcgcaggtcataagctccggacggatccgctccgtcatcaggacagacatctttgtggctatctccttttccgtcatatcgcacatcggtgagcctgcgagataaacggctccgtctaccaggccgagctgccggatgatgctttttaaaatagtggatttgccggagccgttcggcccaatcagcgtcacgatctccccccgcttcacatgtatcttaatctgacggataaggggaaccctgccatatccaacggccatattatccgtataaatataatcaccagtcacggctctcctccttactgtatattcttcctgccgcgcaccatcatgtaaatcacaaccggcgcgccgaaaactgccgtgacggagctgatgctgacctccgtcggggcaaatgccgtcctggcaatcagatcgcagaacagacagaataccgcgccgcccagaaagcagcccggaatcatcagaatcggcttagccgttttaaacaggctcttcgccagatgaggaaccgcaatgccgacaaaggagacaggccctgcaaatgcggtcacgcaggccgacaaaatactggataaaagaaccagggccagccggaaccgcctgatgtccactcccatgttctgtgcgtagacctcccccatctgataggcgctgatcggctttgccatcagaaagaccagcaccagggatacggttatcaccgctgccatcaccctgatattctcccaggacatcccgaaaagcttcccatggaccagttgtggagattgacaatattagcgtcgtctgcaaatgtaacggcaaaatcggttgccgccgagcagatgtacccaatcatcacgccgcagataacaagcattgacatcttcttgacccggccggcgatcaagaggacaaatcccattgatatcatggctcccgcaaaggcggccagtatcatgaatgccgaattaacggcaatcccttttcccaggagaacgatcataagaagcgacaccaccagcttcgctccggaggaaattcccaggacaaaagggcctgctataggattggcgaaaaatgtctggagcagaaagcccgacaccgacagcgctccgcccagtatcgccgcggccagaatacgcggcagacggatatcccatacgatgcggtacgccgtctcctcccccgttttcttaaagagaatcccgccgatctcctccacggtcagatgaacgctgccggaattgatattccagataatcaggcagcacatcataaccgccagaacggcaaatgaaattccatatctcgtgtatgctctttttgtcatagatgcagctcctcgttattgttcaaagatagtatcccgaaaggtgttttcgtgcgtatcacgcgcgtgaaccaatgtcattatggagatttaactgaggttgggaggacgcgtccggaccggaccatgtcctgtgtggtgaaggggctggctgagtcttccgtccccggttggagggtgccgtgaggggggaatccggccggaatgaattgctgcggggaccgtttgcactctttggagtgcgcagcagtgccaggctcgtgagggatctcgctaagcaccggcggactcccatgtcccctccgcaattgattccgcctacttccccgggtcaggttttcgccggggacggaagactcaggcggaggttttcgcggcaccggacccggtccgttccgtccgctgcctgcggcggcgtcctcacccgtcttatgcagataacgcagggatccacaggcaggattattccagacggtacagataaaccatctctgccggatcggggttctcctcggtcagaattctgcggatatccagaatcatatcccccaggcccattgtttcctgaaaaagattcttttccgtacaccagacgtttccctccttcaccgctataaaatcagccagcaggctgctcttagccaaaagctcatttaaagatttgagctccccgtcaatggtgctgttgtatatcaaataatccgcatcttttaccgacgcataaaatgcttccatctgcatattcatcgtagacagcgcattttcattctccatgagattgtcgggaacatagctgccgcctgccatttcaatgattttagccacgtagtcgcttgattttcttacatttacatatccgttggagctgacgtaaaaaaacgccacggtcctgccaagcggctttccggcatcgaggtttccgagctgctttagctgttcatcaaacagctcttttgccagctcctctttgcccagcagcacgccatacagcttcagccactccattctgccgaggggatggctctcatagctggagcgttccacaagcacggggattccaagctgttccagctgttccttcacctcggggcatggtgaatcatcgtggattcgattgccagatcacaggattttgagaggatcagctcgtaatccggggcattgtatttccccgcataaatcattttcccctcctccatcgccgcttttgcctcctctatataccagcctgaggcatcggttccggaaagtgtgatctggctgataccatccaggcaacgcatcgaatccatggctgacgtcgctgccaggtaaatatggctgagaggctgtctgattaccgtgatgtcatccgaaaggccctttggcggctctttcccggccggaacgacgagatagctgccgctgtccttaatcgtaatcagcgcacagccgttgtcataatagtcaacggaaaactggtctgcatagagtaattccatgctgtgatcaattttggcggtttgaatctcctccgggctgccgtgaaccgtattgccctgaaccgcgctgtcttgagccgcacttccctgaactgcgctgcctccggccggattacccggtgcagcgcatccgcatgcacctgccgctatcagtcctgtggcggcaattgcgcttaaaaaccgtactaatctgtttcttcccatcattctgccttcttaatcgtcgatgaatcaaatgccagcgtataatcgatctcatgaggctcactcatggctatcgtatccgcgataaccggtattttccagtcaaatccggttaccggaatttcaaaggccgaattgccctccgcatttactgtctcatatttaacatcatcaactttcatatagtcgtaatttgcactcccccagacgatggtggcaaatgcctgtccattctctacccggagccgggccggagactctacagaagcccttcccgaacctccgcccagtgtcacctccgccgtatagataccgtctttgagcgccaggctttccactgtcgtaattttcccgtcggcaatggcgtcggccggaagagaatcggcccggaatacaagaacccggtcataccacttctctttctttttgctgaatgcactgcagtcgatccccatatccagcgcctccaccggaacctgaaaggtatgaagtccatcctctgtttccctatatgggataaaatcctcttctcctgctttggccgcttcctccccggtccccataaacagctttaaataaccggttccgcccatcgtcatgaccgcggtcatccggccatctctgaccgtcagctcacatccggtaacctggaacatattagaactggagtccacctttacaggataaacgccgtcctttatctccccggcgtacaccggctccatatcctcatccgccacattaatccggctgcttgtctcttcccccgcagccacccggcctgctccgtccttccctttatctccctggatttcctcaggctcctctgaagcagccgtctcagacagcccagtccctgtacccgtcacggtttctgccgccgttgtctcagtccccggcgaagtcgtacgcaggctgcagcctgccgccatcaggctgaaagcgatgattagaaccggccatcctcgtttctgaattttcataaaatacctcacttctaaaagggcgatcagcaaattgctccgaccgccccttattttctcttattgatttgactgcctttttctttttggctttcttctactttagctttcttttatgcgtttaactttcctctattttgacaggctgtccattgccgcctgtgcatgctctacaaataactgctggattggttccatctccccgagtcctctcagcagacatgtcacctcatatccggcgccctcaaagacattcttccaggatccctcatcgtcccctgccatatcattattggcgtgatctccggcaacgatcattaaaggctccagaaccacccttttatagcttccctttttgacttcggcaagcacatcctcaacggtcggcgccgcttccaccgtaccgatatagtaattctcatgcccggcctctttcagcatgtcctgcatttttgcataaacctgattggactcggcctcagtgccatggcccataaagcagatagccgtttcaccgtcgtcgtactctgcggttgcctctgttatggccttcatcacagccttaaaatcatcgtctgaagtaagcagcggctctcctaccgccaccttctcaaatgcatcggaatactcagccacttcattaaccaaatcgttatattccagtccgttcatcaaatgagtcggctggattacaagattcttcacaccgttgtcagccgcccggccaagagcttcccctacattgtcaatcgtgacattatcccgtgacttcacatggtcaatgatgatctggctggtaaagcctcttctcacagagtagtccggaaatgccttctccatcgcgttttcgatggcgcccaccgtaaaacgtctgttgtcattaaagctggttccaaagctgacaaccaaaagctcattttctccgatttcatcctggtttctggtattgtccaatgaagcgtcccccgtatcgtagttctcttcgtcctctttggcttcctctgctgcctccgcgctctcatccgcttccgtctcaggagccgccgtctcatccgccgtaccggctgcctcagccgcagtttccttctgccctgctgaacaccccgtcaccagcgacgccgccagcgccacagatgcaaataatactgccagttttttgattttcatgtttcttcctcctttttcctgtatcacattatcggttcaggtaaagtacggaattttccattaaagaatctgctgaagtctcaaccggcatctgatgcgcaatgacgcgcagcagtaaatttcatttctctgggcgtgtcattgcacagagctatatactctgcaggacaaagcgtgcttgaaaatttttccagcacccgtttcctgcacagtttaaaaatccgtcaccgtttgagtcagagattcccggctaaaagccgttaatcggcacaaccaattactcgtgatttggaaaatttattcctgtaccaacagacggcaggtttcctgacttgtctatcaacacgtataaccgccttcccaaaccaaacggctcagtggcttacaatgacacagattatacgctccttacttacagtgacgagatcgtacaggcatttcacctgtttcccttttacccactgtccgcacaggcggacagcggcaccggctgctcttaactcgatatgttttctatcctaccactttaatggaaaaaatgcaataagatggagatttaactgaggttgggaggacgcgtccggaacggaccatgtccggtgtggtgagggggatggctgagtcttccgtacctggttggagggtgtcgtgaggggggaatccggtcggaatgaattcttacggggaccgtttgcacttttcgaagcgcatagccgtgctaaattcgtgagaaacctcattaagcacggatgggcttccatatcccctgcagaattgattccgcctccttcccccggtcagggtttcgccagggacggaagactcaggcgaaggttttcgcacaccggacctggtccgctccggccgctgattgtctccaaccttaaatggggaggaccctgtcgcggccactacgtgtttccggcaaactgatatcaaacattccgcaattccttaataaaggcgcattgaaggcatatcgtatttcccgcctacggaagctcttagtggcctcgacaaggtccgctcccgcacttaacgcgtgagactatcagcggccgcaggccagcggacggggccgatacacttggcggagtctttcgtcccggcgaaaacctggccttggggcggaggggaagataaaggctgcggatgccgttgaaatccatcgctgattagcgaggtcccttacgagcttagcagcgcgatgcatttcacagagcgggagcgtgctccgcagacttaatcttcacccgcagccccaaaccacgataatcttcccccgggacgaaagactcatacacacacaccaccaccccgtccgctggccgttccggcggcgtcctcacctgcttaactaaatctccattcttttgacgtcccctcccctttaggctataataaaattaaattcattcaaaacgcgcaggcgtctctgccggccccctgcctgcgcccacagatagagacataaggacaggaggaacaactgatgacacggatatttttagttgaggacgataaggcaatcgctaaaaacctcacgcttttacttcgctcggagggatttacggtcagccacgcagccactcgggggaggcctccgccatgctggccggaaacctttttgacctggcattggtagacattgccctgccggacgggaacggtttcacggtctgcacggaaattaaagaacggtatcagattcccgtactttttctgactgcctccggcgacgaggcaagtgtcgtgacggggcttaacatgggcgcggacgactatatcacaaagcccttccggcccgcgaactgattgcgcgaatccgtgcggcactccggaaacaggaacgtgccgggcaggcgtttgaagtctgcggtctttgtgtcgatacggcaagcggcgttgtgacaaaatacggcagggagatttttctttccgcgctggaataccgcctgctcctgatatttatgaacaatcccaaaaatattatcacaaggagccggcttcttgacgaattatgggatgcggcaggcgaattcgtcaatgacaataccttgacggtgtatatcaaacgtctgcgtgagaaaatagaaaacgatcctgcaaacccgcagattatactgacggtccggggcacgggatacagactgggaggaaatgatgcttcgtaacagggaatttaggcagtttgccattctattcgccttaatgtccgccgcatctgttgcgcttggctttgcaatcagtacggcggcgggactgcttttatcattttcctgcgctgccttcggcgcagcattttttgtgtttaccaaaatccggtataaccgcatcgccctgctctccagtcaaatcgatctcgtgcttcacaatgccgggcggctggatctcggtgagatggatgagggcgagctttccatcctgcacagtgaaatcacaaaaatgatgcagcgcatccgggaacagaacgatgcactgaaacaggataaaatccggctggctgactccctggccgacatcgcccaccagcttaggacaccgctcacatcggcaaacctcatcctgtcactgctctcagacaccgcggatgaaaatgagcggagggcatttctgagggaaaccgaggaacttcttgtgcaaatggactggctgataacatccctgctcaaattatcgcggctggacgccggggttgtcgtattccaacgcgggccggtcgatgtaaacgaactgatacgctcctcactttgccccttccttattacaatggatctgcaccgcattatcgttcaggtggatgcgccggagggagtcatcattcagggcgacaacggctggcttgtgcaggcaatccagaatatcctcaaaaactgcatggaaagcgcaggcgacgacgggttgatcgaaatcgtctgtacggataatgtgctgtttaccgaaatcatgattcatgacaacggcgccggatttaatcaggaagacttaccctgtctctttgacagattttacaggggaaaaagcacaggcgtacagggctatggaatcggactggcgctctgccggatgattatcacaagccagggaggtaccgtcaccgcgaaaaaccatccccggggcgggcggtcttcaccatccgctttccaaagtgacagagcgatgtgacagagcaaagtgacagggcaaagtgacggttctctcaccgaaaagtcaccggaatgtgagtttaacgctctatgatatatgggtaaaccataaggaaggaggctcacagaatggagctgttaaaaattgaaaatctctgcaagatctacggcagcggcaaaaaccaggttaccgccctggaccatgtctcactcactatcgaaaagggggaatttgttgcaattatcggagcttccggctccggcaaatccacgctgctccacatcatcggcggcgtagatgtacccacaggcggaaaggtgtatctggacggacaggatgtatatgcgcagaataatgaaaaactggctattttccgcaggaggcaggtcgggctgatttaccagttccacaacctgattcccacgctgaacgtagtggagaacatcactctgccgatcctgatggacaggcgcaaggtcaatgaggagcggcttaacgatctcctccaaatgctgggacttaaggagcgcaggacccatctgccaaaccagctctcaggcggacagcagcagcgtgtttccatcggccgcgcattgatgaacgcgccgcaggtctgcctcgccgatgaacccaccggcagcctggacagccggaacggccacgagattataaagctgctgaaggagagcaataaaaaatacggacagaccctgcttctcgtcacccatgatgagaatatcgccctgcaggcggaccgcattatcggtatctcggacggcagggtggtgcgggacgaaagggtggtgcggcgatgaacattttcagcaggattgcgctgcaaagcatgaagaagagccgctcacggaccattgtgacggtaatcggagtgattctgtcagccgccatgattacggccgtcgctgccttcggcacctctcttctgaattttctgctcaataattcaatagcaaaatatggagactggcacattgagtttccggatgtcccctcttcttttgtccgggaacgggcgggcgacaaagagctgtcaggctccgcctcttttgaaaatatcggctatgcggtgctggacggcgccaaaagtccggagaaaccctatctttttatcgccggattcagcgaggatacatttaacaccctgcccgtccgcctgatttccggcagaatgccagaaaacagcaaagaagttctcgtaccggcccatatcgcgataaaaggcggggtcaggttcaaggtgggcgacaccctttcccttgccgtcggaacccgcacggacggtgacagaaacttgagccagcacgatccttaccggcccggggacggtacaaaagacggcggtgaaagcctgctgccggacgcagtaaaaacctatacggttacaggcatatgcgaaaggcccggatttgaggaacactccgctcccggatatacgctgataacgaaggcggacgcatcggcccaaaccggcagtctgagtttttttgccacgctgaaaaagccgcgcaaggtcagtgcttacgcaggccgtgcagccggagggtacccgtttctcttaaatgattccgtactgcgttttatgggaatctcagaaaacagattgttcaatacgcttttgtacacggtcggcctcattttggctgccataattatgaccggctcggtttttctgatttataattccttcaatatctcactaaacgaacgcatacgccagttcggtattctttcgtcggtgggtgcaacgtcaaaacagcttctgaattcggtactgtttgaagggctctgcatcggcgcagccggaataccggcgggcatattagccggtatcggcagcgtccggcttctgctccctgtcgttgccggaaagttccggaatattatccacagcacggttcccctgaccttatcggtatccgttcccgccattgcggcggcagccgcgctcagcctggttaccatcttgatttcagcatatattccggccagaaaagcctcaaacactcccgtcatggaatgtatccgccagacaaatgaggtaaaaaccaggccaaacgaagtgaaaacatccggtttggcgctccgtctgtacggtttggagggaacacttgcgcataagaattttaagaggaataaaaagcgctatcgcaccatcgtgatgtccctggtcctcagcgtcgtactcttcgtatcaggcagtgctttcagcaccacactgaagcggatatcacagcggtatattgtggatatcggctatgacatcttcttcgatgtccgggacatggaggacagtgaactgctcccgctctacgacaggcttaaatcagcggacggagtttataaaagcatgtatcagacggttctgtcctatgttgccgctgtcgatgcaggcagtttgtccagccgctgtcaggaatacagagacggcgctcagccggacgggacgatttatctgcccatggatatccagttcatcccggaccgtgaatatctgcgttttatcagtgaattgggactgcccgaagaaaactgcaccgggccggatgcggatttgattgccgtagccaaacagaggaccggcacagagaagggaagcggggaaatctttgatttatttaaagagccatccatgaccctgtctgccgcgccggaaagaaacggcagccccatagcagccagggaacagaaactgaatattacctttgccgatatgtatccggtcgatccgcccccgaagcaggcatccgggccggaacagcctgaccgggtatttatggtcatagctccggattccgtcagaaaaaggtttgaaaccccggatacccataaagttaccggactgggcttttggtcggaaaatccttcggaatcggtgagggagatggaattgataattcaggatgcagggattacgtctgagtataccctctacaacctgtccgaaatactggatcagttctacagcgcagcctttgtgattgatgtgtttacttacgtctttgtcatcatgatttcactgattgcggttgccaatgtatttaacacgatctccacgaatatccggctgcgcagacgggagcttgccatgctccgatcgatgggaatgtccggccgtgattttaataaaatgatgacttatgagtgtgttttttacggaatgtggacacttttcaccggcctgccgctgtctgcagccgcctcatggctgatttacagaggtctggcatcagtggaaaaaatggaggatttccattttgtatttccctggcgcagtatggcggccagtgtgttcagtgtactccttattgtcttcatcacaatgatgtatgccgtaagccggttaaagagagaaaacattattgacgcgctgcgcgatgatatgacttgattgggaatcagaggatccgttttccttcctgattcaggaacaggagcagctcttcaaagggcagcggcctgctgattaaatacccctgaaggtaatggcagcccatttctgccaggcttcgggccgtccgtattgtttccactccctccgccgtcacctgaaagtgattcgctccggcaaagccaatgatgttcctgacaaggggctttgccaggcgctggttatccatggcccatacaagctctttgtccagctttataacatggaacggcatccgaagcaaacgcagaagccccgaataacctttaccaaaatcatcgatagcgattgaaataccgatgtcatatagctcccggactgtctgcagaaagcttgtctcatccggcagtcccgcgctttcactgacctccatacagatctggccgggacggactccgcccgtaattaaggctgttcctactttacgggcgagtcccggttccatacaggttgacggcgacagattaatattaattttctctatcccgtacctgttaagctccggaaatgcatggcaggcctggcaaaacatccaccagtctatctgcccgaggtctccgctctgctcggcctgctgcacataatgttcggtatcaaagaatccggcatcgccgtcgctgacccggagcagtatctctacttcggttatcctttttttccctacatggtaaatcggctggtaccagcattccatgccggaagcggcaatcacgaagctttgcggcgaggccgcattctttactgacataattatcaccttatctttcagtacaacagcagcgcgttattaacataataatgattatgtggtaacgcttcgctgaaaatacataccttaacggtcaattaccagaatatcacaaaatattccaaaaacaagtctttataaactggtattggcaaaatttacagacggcaaacaggctgacttgaatttaaatgttcaaatcgcctgtttgcgctgccgccgttctccggttccttgtctgacaaagcggctaaactgcttttcagtcataaatcaggatggaaataccgcccttacaccgttttttctgcaaaaaccacataatcattattatgtggtcaaaacaaatcgcggctctgttaaatcatctgatattatttagataaggtgcatattgtcctgtattattcggacagctgctctttatttttttgctttctatgggttcaggagtcccagaacagcaatctgggcctgatattgtgccgccgtggccgtagtataaatcctcgtcgtatttacattgctgtggcccaggatatccgcaagcttcacgatgtcctgaaaccgttcataatagactgaggcaaacagatggcgcagattatgcggaaacactttatctgccgccacacccgctgctttcgccagctctttcatcgcactccagatattggagcggtccagcggacgtcccgtacggcttacaaagatgctccctcccgttactctctggcgcctgcagtactgcttcaggatgagacacagctttggcggcagcacgaccgtgcgcatctttcctttgttatttaccaccgtcctgcccctgtgtacggcttccaccgtcagaaacttaagctcactcacacgaagtcccactgagcagatactctgcatgacaaggtacaaacgttcattcttttctttcgcagcatgaagcagtctcttatactcctccttagtcagcttcctttcttctgaaaccatcgtctgggcctgtatccgcagcggcctgattctgcaatcccccactcactgtatgaaaaaaagctgttaagagccgcaaccatggaattgatgctggacgatgcatagcctctttcaagcaggctttgcttatatgcaatcgtgacaggtttatctactcttttcccctccggaagccattcaaaaaatgcattgatatccctgatgtatttctcaattgtggcttcactgcgctcctgttccatcagattccatttaaactgctctactttgttcatggtaagtttgtaagtcctgctcatgccgtattcctcctggatgttaagtcttctataggtcggtatttccataaataacattaaataccataaacccggttttgtgaatttttttcactacaccgtaagtctttcccaaaaggaacaggtaaatacagtgacgataacctgcacgctccgcgcacaggtcaccgtcatcaaaaacagcaacaaggcggcagggaatcacccgtccgccttattgctctatattaaatccttcatataaacttttaatatcaaccttcaaagccttgctgattgccagcacctcataatccgtaaggaaacgttccccgatttcaattctgctgatagagcgctgctccagctgtacattataccgtgactgcagccgggcggcgagctgagcctgagtcagcttctgatactccctgatccgtctgatattctctccacagatattcgactttccgttaaactgatatattttcatgacatctcacccttactgccagataccctaatgatgactaattgacattaacacattattttcttagaattactctaatgatgggtatctatacagggcccggagatttcccaattactccctgaaaccgccttatccaaagagtctggcaataaatgtaaacaggatacagatgatcattccggtcacggtcggaagcgccgccgccagagccgtccattttaaacttcccgtctctttcttaatggtcagaagtgttgtggagcagggccagtgcatcagagaaaagagcattgtgctgatggctgtaatccaggtccagccgttgcttacaaaaagctctctcatctgcgaaaggctatccagctccaggatgcttccctgtgccgtataagccataatgatgatgggaatcacaatctcattggccggaaatcccagaataaatgcagtcagaattacgccgtccagccccatcaggtttgccagcggatccaggaaagaggaaaaatgggttaatatactcacaccgcctatgtcgatattggccatcagccagatgacaagcccggcaggcgccgctacgacaaccgctctccccagaacgaacagggtcctgtcgaagatggagcgcacaagcacctttccaatctgcggtttccggtatggcggaagttccagcgtaaaggaagacggcatccccttcagcagtgttttggataacagcctggtcatgacaaaggtcatcgcaatcccgaacacgataacggctgtcagcagaaccgcagacaggacggaagaaagagctcccccggcggtgccgacaaagaacatggttaatattgcaatcagcgtcgggaacctcccgttgcacggcacaaaattgttggtcaggattgccagcagacgttccctgggcgagtcgatgatccggcagccgatgacgccggctgcgttgcagccaaagcccatgcacatacagagcgcctgttttccgcaggcacagcagcgcttaaaggatttatccagattataggcaacacggggcagatatccggcatcctcaagcagggtaaagagcggaaagaagattgccataggcgggagcataaccgatacgacccatgccaggacacggtaaactcccaggatcagtattccgtggagccagtcgggcgcattcagatagacgaacagttccgtcagtctgtcctgaacccagaacaggccgtctgccagaagctgtgatgggtaattggcgcctgttatggtcagccagaaaaccattgccagcaaaagaatcatcaccggatatccggtcagcctgcttgtgagaattttatcaagcttcctgtctgaagccgcatattcgtggttttcaaaggccactgcctctgcgcagacttcctccgcacttttaacaagggcagatacaatcatatccttgaaccggtcgccgtcaatctcctgctccagcagtttttccttcgccgcagccagttcgtttacgagttcttcatctttcagaaacgcttccccgaggtaggcgtcaatctccctgatgagggattcatcggcatccagcagtttgaggctcagccaccggctgtttaactttccttctgctttctcccgcacaaccggttcgagccgggccacagcctcctctaccgcctccggatatacaacagtgagcggagatgtctttatttccccgacactacgccgtccagagcattcatcatctcatccagcgttttctttttgcgcgccgtggcccccaccaccggtacgcccagccgttttgatatcaaaggtaaatcaagccggatgtttttccgttttgcctcatccatcagattgacacagactacaactctggacgaaatctctatcgtctgcagaacgaggttgagattgcgctccaggcaggtggcgtcacagactacgactaccgcatccggtccgccgaagcagataaagtttctcgcgacttcctcctcggtggaatgagccatcagagaatacgtacccggaatatccaccatgacataggactgtttcccggtagagcagtaaccctgcgcattggctacggttttgccgggccagttgcccgtatgctggttcatgccggtcagagcgttaaataccgtgcttttccccacgttcggattccccgccagggcaaccactttgtcttcctgagtctgctttttaatgacaaggcccgaatctaccgctttaattccgaccgaatgcgctgtcagccccattgcgccacctccatctccggctcttgaatcagaatatccgcacaatcctcggaacggatcgctatcaccgctcccctgatgagaaatgccgtcggatcgcctcccggacttctgccgatgcactccacctgtgtatcttctaccaacccgatatccagcagcctgcgccgcatacttcccgtgcttttcaatgtgctgatgcttgcgcgctgtccgggtctcatgtcattcaggcaactttgttcactcataatactgacccctctcgaataaattttaggataaggaaacttttactaacatgttattctgaaggctgcaatatggtgacaaaagtgaccggttcgtttttcggaaagatggggagcatatgaatcagaacgacgggttctatacaatgaaaggctacaggctgcagtcagacagcaaaatgacaagcgctatggaagattatcttgaaatgattacccgcctgtcagggcagggcggttctgtcagggtcagtgagctttccaggatgctccatgttaaagcttcttccgcgaccaaaatggtccagcagcttgttcaggagggttttgtcctggcggagcggtacggagatatcgctctgacggaaagagggagggcgatgggaaattacctgctttaccgccatgacgtaattcaccgctttctctgtcttctgaaccattcggaggatgagctggaacaggcggaaaagattgaacatttcttaacctgcgagactgtaaaaaatctggatctgctgagccagaaaattcagcgctgaaggacgctgtgcgcacaggttatcgtattataggacgaactctcctgttaaatgaaaaatatccctcaaacattatatagtctgagggattccttcactgacgggatttcttatttataaacttttatgactccttcaatttttcgtaaagcttagaaagctccggtaccggaggcatacagcttttgccgctgcaaagatagaacaggttccccgcctcgggtacagggtaatccctcgtataaggcgccagtttttttagggcgtcccggttctcctctgttttcacgatgacggccagccccggcactgtctgagccaggtatgcaagctgatttgtcaatttaacgcgttcatccccgcaacagccggatgagagtgtgcagaccagctctcttgacggatacaggacgtccagcatcgtcagaagcgcatagctgtgtccatagggatatccctccatagctcccgccaggtatttaagctgtccttccagcgcctcctgccatttcgcctcaccggtgagctgggcaagatgctgcagcacacgggccgccgcagagtttcccgacggcatcgccccgtcgtatgtctcctttgttctcacgatcagccgctctgcgtcttttgcattgaggaagaagccgccacgctcccgatccagaaactgctcaaccatcttgtccgcccagccggctgccctgtccagataatcggtccggaacgtcacacggtaaagctccagaagagccaggctatagcaggcgtagtcatccagctttccctccccggcggcttccccgtcccggtaacggaccagcaggcgtccgttccttacaagcgccgtacggataaattcttccgcacggactgccatatccacatattttttctccccgagcaccgctccggcctttgcgcaggcgcttatcatccatccgttccaggaaaccagtatcttatcatccttatggagcctcgtccttttgaggcggtaagcatacagcttctcatatacctcatccgcttctctgcggcttttgctcctgccgtcctcttcctcagctccgggccgctcctcacaaatgctttcatacgcttcgttgccaaggagatttggaatgctttttccctcaaaattgcccggcccggtaatcccatagttccggcagaacgcttttccctgctttgttccaagaatttcgtttatttcctccggggtgaagacgtaatactttccctccactccgtcactgtccgcatcctggccgcagtagaatcctccctgtgggtccgtaagctcggcttctatatatttgagaaccatttctgccgcacacccgtataatttacgccctgtcagaccgtatgcttttacataagccatcacaagaagggcattgtcgtacagcatcttttcaaaatgcggcaccagccatctctcatccgtggaatatcgtgaaaatccgccgccaatgtggtcgaagattccgccccggtacatctgagtgagcgttgtttccgccatggaaagcgcctccggcctgtcttctctgataccgtactccatcagaaacatcagattgtggggcgcaggaaacttcggcgcgcctccgaacccgccgttttgtttatcgaagctgccggcaaactggcggtatgcctgacttacaatttccggccccggctcggacgataccgtaagctgctcctgttctttgagaaatgcctcaatctggtccgcgctgtccagaagtttctccctcttttctttccactgcttcgccgcagcagccagcagcccgtcaagccctatccggccatagcgcgccctgggcggaaaatacgtccccgagaaaaacggccttccgtcaggtgtcataataatggtcagcggccatcctccctgcccgttcatggcctggcagaccgacatatacacagaatcaatatccggtctctcctcccggtctaccttgacacagatatactcccggttcaaaagctgtgctatttccctgttttcaaatgactcccgttccatcacatggcaccagtgacatgtacatcacagcagacggtcagctatacccaatagataggaagacaggcttattttcagtccttgccttctcaaatgcctcctccccccacggataccactgcaccggattataagcgtgctgcagcagatagggtgatttctcattgattaacctattgggtattttattctgattgtccacgtgaccacctccttcctgttatcttcctatcttctccctgccagcggcaaaatatacgctgttgcggacggaattcaggccaggtagcattcccgcaccgagcaggcccacaggacaatcacgaacagaaccgataccgccatggaagcccagttgacgccgccgccaaaggccagctgccggatcagccgtgtggtatgcgtcagcggcatcacattcacaagccacttaagcgcctccggaatcccatccaggaaaaaaaatgtcccgcacagaaacgacatgggagtaatgacaatattggtgaaattattcatgtcgtaatgcgactcgataatcattgccgcaaaaaatccgagggcggaaaaaatcagggcattgagcgttacggccagcagcagccatccgtttaacgaaagccccgcccctgatacgaatcccagaataagaatgaagatcccagaatacaatccgcgcagggcgcctgccagaatatggcccgtcgccagtaaatacatcttcgtgggagagtaaaaataagattcaaagcttttttcatggaggcgcatgacactgattcgcgtggatacggaagtataactgttgcgcatcgttgtcatggataaaaggcccggaatcaggtaatgcaggtacggctgtccccctgaatctatcattctgcccagcccaatcccgaaagtcacaaaatagagcagaggcgaaaccatctgtgagaatgtaatacgccagaatctccgttttaaaaacagccattctctccacagaatcgtcgttatttccatcctcccacctccttgctcgtataatggaaaaagacgtcttccagggtggccggaagtacgctgaagggatagtccagttcctccgaacgcttcttagctgcgcaaatatcactgaaaaattctgtttccagcttatccccctatcatactccaccttgaaggaacctatctcgtcaatcagaccctgcggtgtgtcttccttaaatatcatgccgttgtctatcagcattacacgatcgcagaggtgctgtgcttcctcgatgtaatgcgtggtgagcaggattgtcttgccctctttatgcctggccctaagaaattcccatatatcccgccgggcgtttgggtcaattcccacggtaggctcatcgagaaagagatactgaggattgtggatcattgcctttgcaatcatcaatttgcgcttcataccgccggacaggttctgggccggcctcgtccggacagactccagcccaagatatgccagcaggcggtcggtggaagcggtgatatcggcctttctcatccggtaaagccgtcctgtaaactccatgttttcttccaccgtgagttctttgtcgagatttatgtgctggctggccacacccaccgactgtttaaccgcgacggcgttccggtccatcggacgtccgtcaaattccacggttccgctgtccggaaccagaaggccggtcatcatacgcatcaacgtcgtttttccggcgccgttcggccccagcagtcccagaaatgttccatcctgcacctgcatggagatgtctttaaccgcctctacattttcaaatcgtttcgacaggctgcagcattggatcatggcgtcattttcacctgcctcttgataatcaccgttgataaatacgggatatcgtattgttccagttccgttatatccgtaacgaggcgttcctctcccgtacctgatttcgtaaccagcacgaaatgctcctccagatgattctcccggattgcctgcagcagggcctttttattcgaggaaggcttcatcagcacaatattatcgtggcttctcagaatttcccccaaatcctcgctgctgttcttgcggaccggcgcgataaccagatcctcatcccaggcaaccagcggcatcatcatcgtatccgccactgcgcagaaagaggtaacgcccggcactacctccactgcaactcctgtcttctcaatataaggcagcgtgtacatgaaggtgctgtagactgccggatcgcccagcgtgataaatacgcctgtccgttctccctgtaaatgctctgcaatgcagcgtgcatttctttcccacatcttccgaagctcttccccatgatagtgcatcggatagaccagattgacaatttccgcttttgaatgcttcagatgttctttaatgatgtcaaaggcaaaactgcctgcgcctttcgctttttccggacagaaaatcacatccgcctcattgagaaggcggtgagcctttaaagtcagcagttccggatcccccggcccaacgccgattccatacattttacccattatatatccctctttttctattgttatgtcagagcatgcctgaaaatagctttctgatttccaaacaggctctaacattataacatagaaatatggatttgacgattttgtgtacggcgttttttgccgtttctgtgcattgcgtgtaacagttcatgctgtctgaactgttaccattgcggcagcgtgtcgcctttaaaaggatggataaatgtactcttcttccggtttttcggccgcctctatgctctgcgcctttagcataagagaagcgccgtcagcggtaagtccaaccgtccctttcacaacgacccagtcatcctccttaaaatccatactccggccgcagtcaaccagacagccgacaggcgacaaatcagccgcacagcaccacatggacagccggacgagggcaaaatccgcctccttttcgatctccgcatccttataaataaagcctttcagtataacggtatatcctttatatgtttcataggaagtgccaagctcatacatccacgcgtagtaatcttcatctgccaccgtgatggtccggttctcagcatccagtccgctcaggccctgtccctgacttttttcttcctcctgccggtctgcggcggtctccgtgtcttcttccgtctccgtaattgtaatgtccggcagtggtgccggagtttttttctccccgttcacgcgtccgccgtttcccgatgccatgaacggaccggcattatcatagcttttagccatgctgctttcgccgggagccggcagatgtacggagagcatcagcgccggcaggattaaaacaaaagagcgggccagcttcgccttatactgcggcgccagtaagtatctcccttccgacgcggcccaaatcaccatcagaaccgacagaccgtaaagatacggcttcatccgcggcgtcacgtagttcaaatactcgcccgaatatgtcagatgaaatatcagataaccaaacaggagtaaacatatacattccgtccccgcctgcaggttaatcccctgccctccagcctcatagcagtatccccccgtttcccgatgccatgaacagcagcagtccggtaaaacagaccaggaatgccgttacggccagcctaatgacaaagccggatttgaatcccgagagcagcatggccgcatttttaatgtccatcatcggaccgaatacgagaaagccaagcactgccccgacagggaggctggcagccatgctccgggccacaactgcatcggaagaggagcagagcgacagtacaaaagccgtccccatcatcagcagaagggccttccacggctcggtcccgctaccggacgccactgcccggggaagcagatcctgaaacagaaccgatacaaaaataccggtgacgaggaattttccaaccgaaaaaaactcatttttcgcatgccggaacaccagcaatatccgagctgcagggtttgttaccttttccggcagcctgtaatccccgcaccctgcctgaaccggcatggcggtttcaatccggcagtctttcggcggcttaatcagccaggtcagtccgcaaaccagcgcgcataaaatccccagcccgcaccgggccgcaatcatccggtaattaccgttaaacgcgtaccaggtggacagaatgaccacaggattaatcaccggggaaaccagcataaaggtcactgctgcgggcagaggcactcccttttttaccagactcttaaagatgggaatggacgcacagtcacagaccggcaggcaaaagccggccagaatggcaaataactgccctgacagtacttttttgggaaatttttgctgtatccagtccggcggcagataaacctgtatcagcgatgagagcagagtcccaacagccaggaacggaaccgcctgtaaaaatattcccagaaatacactgatataccgctccacgggaaccccaagtcacggagcagggaaaccgctaccatatatagcatcgcgattgccggcacaatcaggagccagtgtcttggctgtaacttgaaatgaaacataccgccaagaaaccgctcccatttcctcccggaaaaaatacggatatccgggttaatgtttaaaagaattcgggcatccttagtgaaattgcggtgacctcttgtcctgataaaagcgcagtcacttccggcaatctgtgaaaacgcggcggcgcccgcatcgggaatcttatattgtaatcccgcctcgtccgccacatagaccaccttttccacgcttaccgccgctttggcagaaaactggagcagcatttcctccagcctgtgaaagtgttccatcccgttccactcaatcagaatcagttccggtctgtgtttcctgacatattttaaaatccgcccggttataccaaaaggattttcctccagacagcttttggaaaatatcattttatgaagcttaacgcctttttgaagcttctcttccccggtttcgaactgaataacgagaacatccagcccgtttaactcctccttcaccagtctgttaattaatgtggtcttccccgaatccagcaatccggttatgacccacgcaggcgtcctcatctcacagctccccgttgaataacgcccggatctgctgcccgtcaagccccgtcccaataaagcagagctggttcccctccatattgacaggctctatcaaaaggctcccgggcgtaaaatggaacaccagatttccggaagaactctttacgattcctttcccccgaagaatttccccgtctgcctgcttcacaacatgcagcaccttcctttgcagcatttcttctgagagaggctccccgcaatctatcgtcacagacgaaaatacctccccggcaaaaggcaggctgaaaaaaccttttgtacggccgtctcttcttctcaatccccgtttcatacgcacaggcttcatggacagcgcttcctccaactcaagcttcagcagagcgctgcccctcggtccatccagaaaaacggcggagggaatggaatcccagaaatccgcctcaatcctggcctcctgattaatttcccggattgctttttcggcataacagatttcccggctgccttcctcctgatggcttaggagaattaagtcagcgcagacaatctgatccttataaaacgctccgtaatttttcaggtacttgtcaaaaaaacggatgtccacaactgtaatcgtccgccgcagatagaaatccccgtgttctccagcttcatgcaaagcctggcgatgccggacagttttcccacgccggacggttccaccagaatgatctccggtgcatagtccttcctgattcgttccaatgccttttcaaaatcgccggtcagggtacagcagatacagcctgcattcaggctggtgaccgtcagattacattcccggaggatcccggtgtcaattccggcctccccaaaatcattttcaatgacaacaatcttcttatctctgaatacagaccggaccattgtcttgattaaagtagtcttacccgctcccaaaaagccggatatcagataaatattcgtcatatgccctccattcttgccggccctgcggcattccctccagccgattggcgccggcctgcgccaggcaatctattcaccattaattacgcacttatgtacctgtcacctttgatatcatttcaaaaatatccttaataattttttgactgtaaataccagtatcaggaaggcgacaccggacagaacgatggcccctcccggttttaaacccaggtagtaggcggcaaacagccccgttgtcatgaaaatcatatccaggcccaccgcccacagaatagtctgtcggtaattccttccaaactgcatggcacaggccaccggcaccaccatcatagaggatacaatcagcgctcccacggttctggccgatacggaaaccgtcactgcgatcaaaagagtgaacaggaaatttaccagcctcaccggcaccccggccagcctggcactctgttcatccagggagatataaaataattctttatacatcagcagaaataaaagcaaaaccgccgcgctgactcccaccaccaggtacatctcggtatcgctgattgcgacgatgctgccaaataaaaagctgttaaagtttgccgcattttttacaaaacccgacaggacgccggccagacccactccggccgacatgactatggcaatcgacatctcggaataccgcggcagctttctgcggataatctcgattccaagggaagcagttatacaggccagtgcggctgcggctacaggattcattcccagaatcagccctgcggcaaccccggcaagtgaagtgtgggataaagcgtccccgatcatggacaggcgtttacatacgatcaccattccgatgcacggaatcacggcagccagtaaaagccctaccagaaacgcccgctgcataaatccataattaaatatctccatccctgttctcctcctgccgttcccttgtctttacaagttccatggttccttcctccaaaagccagatatcgtctgcaaatggttccagccgtttcctgtcgtgggtgaccatcagtatcgtaacgttgtctttctgattaatatgtttcagcagcctgtaaaagtgttccgtacttttttcatccataccggatgacggctcatccagaattaaaagccgcggccgattaactaaagctctcgcaaggaggatgcgctgctgctggcctcctgacagacggccaatcagccgctttgcaaagtcttccatccccacctggatcagagcctgccgtacctgctctttttccttcttcccggcaaagcggaaccgtccaatccgggcatacaggtttgcctgtaccacttcctccgcagaggccgggaagttctgataggatgccatgccgctttgcggtacgcagctcagctcctgccagcttttaaactgccggatatcgcgcccgaagagaaggattttcccttctccccctccgatgggcagttcccccaacagaagttttaagaaagtgcttttccccgctccgttctctcccagaaggaccgcaaacctgccctctggaacagttaaatcaatcttttttaaaatccggctgcttccgtaggaaaagtccagttccctgactgcaatggcatccatatcccatactccttatctgtttttatttcgtaaacgccgagcgtgcaggttatcgtgtcagcgccgcttccagctgctttaaattctcttccatgacggaaaaatagtcggctccgcttttctgttcctcatcgcttaagccctccagcgggtttaatacctgtgtggcggcaccggtttcctttgctatggtttcggcaaccttcgggcttaccagttcctcaaagaaaataaccttaacaccgttagccctcacaaaatcaattacctccgccattctggccgggtcaggctccgaatcaggagacagcccttcgattcccacctggttcagtccataggcatcacagagatagccgaatgcctcatgggcaaccacgatatccttatgcggcagagctgacagggtttctctgtattttcggtccaattcgtcaaatccggccgcatacgtttcgtaatttgcttcataataagcccggttggccggatccgcttcgatgaagccatccctgatattctccatttcttttttcgcattcatcggattcagccatacatggggatcgtaaccgccgtgatcatgcccctgttcctctttagcatgttcatctgtgtgttctttccggagagccagattgccggacgcttccactgttaccagctctttgttgtccagactcttaagcacatcctccacccagtgttccattccggcgccgctgtacaggaacaaatcggcttcctccaggttttttaaatcagtggctgccggttcccagtcatgcggctcggtcccggacggaaccatattcgtcacctgtgccctgtcaccgccgatttttaccgcaaaatcatagataggataaaaactggccattaccttcaatgtttttttgtctccgtccagagcttccgtttgggctgcgggactgctcaacgtatctgagacttcagcccggcccgtcgcaaatgagcagccggaaagcacggcaataaatgcaatcgccgtcacgaccagtgctccctgcttacttattctgtttttcttcatgaaataaatcctccggtttgtgtttttgtaagattactgcctgccggcagtcaaaaaaagaaaaaagggtacgcaaaaacaaggcagacctgcccggcagatattctctgtcaggccctgcgcaaaagcggttcagggtctgcccttttatgaggacattttaattatctaagcggatttttaagctgactaaagaaaccgggcaaagatgaagaccggtctgacagaatgatatgaatttgaatgtaacatgaaaggcaaggacagcaacggctcccgtaccaactgcctccgacagcaggcgtattgcggatacacatgcctctatctcggcgcagacgggacagtcctcacccgtacagatatgttctgcgtgcgtgataataaaaaggccggagagaaacaggacggctgttacaagaaacgccgcaagccatgcattaattcgtttattcccagcaaaatttttcatgttctctcctcctttctatctttattcatctttgcggcatccgcagtaaccatacagaaccatatggcgtttatccagctcaaatccatgttcttcacagatatgcctgaataaatcatccagcctggaacattccaggggatgaagcggccgcaccgcaggcagaccagcttccccggcttcccaagctcctccttatcggcataacagtaccgtatcctggagccgtcttcggacgggagcttcatcacttccccctcctcggccagacgctccaggcccctgtatatggttgtctgccccacatgcacgccctcctcccgaagacggtccatgaactgctctaccgtaagaaaacgggattcctgcttttttaagcaatttaaaatgatttcctgttgttttgtcctgtatctgcctctttcagacatattcagcctcccaatttgaaactgattttcattttacatattatagcagtatttccggtattgtcaaggtaactttttatcatctggaggaccggaccgtgagcagttatgtcccgatgcggggcggttgaccataaaatgtcagtccatcgcacggagcaggttcaccatctcgatggcgctcaccgcacagtcaaatcccttattccctgcctttgtccctgcacgctctatcgcctgttctatattttccgtggtgagtacgccgaacatgacaggaacgccgctctgaagcgaaacggaggcgattccttttgacacctcgctgcacacgtagtcatagtgtcccgtactcccccggataactgcgccgaggcagagtaccgcatcatattttccgctctttgccatttttgacgcggccagcggtatttcaaaagctcccggaacccacgccaggtcaacctcatcttcttttacgccgtggcgcgacagaccatccatagcgccgctaagcagcctggatgtaataaattcattgaatcgggcggcaactatgccgaccttgacgccctgtgctatcaatttaccttctattgttttcatcgttcttctctcctctttgttgtgtctcagtattttaaaatatggcccatacgctgctgttttgttttgagataaaataaatcatgggccgtagcatccatttgaatcggcacccgttttgttatctccagcccaaactccgaaagctgatatactttatcaggattatttgtcaaaagacgcatgctttttactcctaaatcacggagtatctgtgctccgatataatattctctctgatctcccggaaaacccagcgccagattggcctccagagtgtccattccctgttcctgcagctcataagctttcagcttattgattagcccgatgcctcgtccttcctgacgcatgtacaggagtatcccccttccctccttctcaatccgcgtcatggcggcggcaagctgttcaccgcagtcacagcgcagagagccgaaggtatcacctgtcaggcattcggagtgcacccggcacagcacgtccctgccatccccgatttccccttgaccagcgccacatggtgttccccgttcaaacggttcacatatccgtatgccgtaaacgctccgtactttgtcggcatcacggcggcggtcatgcgatcgaccagtttttcacggcatttacggtaatgctgcaaatcccggatagttataaatttcatttcccatctcttcgccagttcccaaagcccgggagtgcgcatcatggttccgtcctcccccataatctcacagcaaaggccgcattccttcaggccggccagccggcacagatccacaactgcctctgtgtgcccgtttctttcaagaacgccgttcgtccttgccagaaggggaaacatatggcccggcctgcggaaatcctccggttttgcatcatcctccacacatttcattgccgtaacggaacgctcggcagcggaaatccctgttgttgtagtgacatgatcaatggataccgtaaatgccgtctcgtgattgtcggtattttgttcagccatttgtgggattttcagctttcggacataggcctccgacattggcatacagatcaggcccctgccatgggtcgccataaaattaatattggctgtggtggcaaattccgcagcacagataaagtcccctcattttcgcgttccggatcatccgtcaccaatattatttttccattcttaagctcttcgagagcttcttccaccgtatcaaattcaaacattctctttgcctccttaaactgttctagaaaccgtgacgtgacaagtattccgccgtaacagtactctgctgcggctgcgctttctgagtgtatcctgcggctggatgtaccagcttttccagatattttgcaatgatatctgtttccagattgacactgtcccccacgcggcgttcccctaaaacggtgacacgcagcgtatgagggattacggaaacggaaaacgaaaccgtatctgtctgtgcaaccgtcaggctgatgccgtctattgtaacggaacctttctccactatgtaacgcaggatcgccggttctgcccgcaccgtataccagaccgccgtatcgtcgcgcctgatcctggttatggttcccacgccgtccgcatgaccggctacaatatgccctccgtatcgtcctgctgccggcatggcccgctccagatttacatgcatcccccgtctcagccccaggagggcggaacgatccagcgtctcatgcataacatcggccgtaaaacctcctgcaggaagagatgtcacagtcaggcagattccgtttaccgctatgctgtcacccgtcttcgtaccttccagaaccgtacgggcctgaatatccagcgcagcagaataccgtcccctcacaattcctctcacaattcccatttcctcaacaattcccgtaaacactgccgtccacctcactctctatcagaaaatcttcccccaggcggattatcctgctgtttttcaggacaatgccgtcacccgggacaaaaaaccggcgccctccaccggggttttggaagtctcgcctccaagcagtttgggagcgatatatgcttctgtcttctgtacaatcccgctctcaagagccgcccagtttaatgtgcctccgccctccagcaggatactgtcaattccctgttttcccagtttccgcattaattcacgcaaatccacatggccgtttttctccctcacggtcagaacagaacatcctgcttcctgataaaccatatgcctttccggatcgtcacagcaggtcgctattacagtcggcgcctgcccggccgtcgcaaccacccgggcggcaggaggcgtccgaagtctggtatcacagataatccggacgggatttttcccgcctctcacaccacggcaggtcagcagcggatcatccgatattacggttcccacacctgccataatggcggtgtagcggtgacgcagtttctgcacatgatgcctggccgcttctcccgtaatccatttagattccccggtgacggctgcaatttttccgtccatcgtcatggcatatttcataactacaaagggatgctctgtcctgatgtaatgaaagaacacttcatttaatttggcgcattcctcccggaggatatcctcggtcacgctgacaccgtgttcccgcaggatacggatccccttccctccgacaagagggtttggatcggctgaaccgaccaccacacggctgattccagcctgcaaaatggccttcacgcagggcggctgtttccctgaatggcagcacggctccaaagtcacatacatcactgcccctgcggcggctccgtacaggaagaaagtgcgttttgttccgcatgggggcctccgtatttctgatgatatcccctgccgatcacgcgcccttccttaacaatcacggctcccaccatcggattcggcgccgccaggccgcagcctttcctggccagactcagcgccatacgcatatatttctcatcgtttaacataaaatttacctccaatcaagaatgaaacccgctcacgggattctccgcctgcggcgggtcgcttcggcgacatgattcccttatgccgcaggcattggctcacttagcgagtgtaatgagcttagtgaacaagccctctttagagctgcgctctccgcggagcggttttaatttaacaggaaagttgtcctgttaaattaaaaagccctgaacaaaagctcagggcatgacagcgtggaacagaaatagaatattctccgtttgcggaggatcgctacagcggcataattccttgccgccgcagtgtgtacctgcgcggagcattttttatttaacagggaaactctcctgttaaataaaaaataaagctccggaatgctgaaaacatcccagagcaaatttctaatgcacagaataataatatcctgcttccattatcttctttcatccagactgtactgtcggcttcggaattacaccgaatcatgccttgcggctcgtgggctataccaccggtagggaatctcaccctgccctgaagattttatttagttgatttagttattataatcgatcacaaatcaattttcaagcaatttctgccggcatccgccacaatcaccgctccaagcgcagagagcgggagtacggaaccggaatgaaattcccggatatccctgtcatatttccaaatgttttgctgctccggcttcctttacttttagggcaaaatcctgtataatcaatatatttcataaccaaaatatgacatgataccagggtcaaaaggttggaaatctgatgcaagcttgcttgcatgaagatttttaatcttgggacccgccaaaaacatgagtaagaagccattcttcgcagaaaaatgagcggattgcgaatgtttttgaggattgtgagagcacgcagtgcggagcaatccggtatcaaaggggtcaaaagaccttttgatcccaacatcatgacaattagaagttacataatatgctgcatccaacgataaaagatgttgccaagaaatagtaaggaggcgttaatcttgaggaaaaattttggagctaaaccgtatacttatccgcagccggtgctgatcattgcgacgtatgatgaaaatggaactgccgatgcaatgaatgccgcatggggcggtatcagcgatgacacgcaaatttccatgtgtctgagtgcagaacacaaaaccgtaaagaacattctggcacgcggtgcttttaccgtcagcatggcagatgccgcccatgtgacggaatgtgactatgtaggcattgtctcagccaatgatgtcccggataaactggcaaaggccggtttccatactacaaaggctgaatttgtggatgcaccgctcattgacgagcttccgatggcgttagagtgtaccctggtccattatgacgccgaatccggccgtctgacgggcgaaattgtcaacgtcagtgcggacgaacgcatacttggagaaaacgggaaaatcgaccccggcaagctggatcccatcacattcgatcctgtcaatcacacgtatttaaagcttggcgcgaaagccggcaatgcctttaaggacggtctgaaactgagataaccgcaaagctcccctgagccgcataggatgttctgtaacggttcaggggcgtttggatgataacttggtaagaggagaaaggaggcaagcagatggaaatacccggactgcagatcgttttcatactaatcgtattggcggaatggattttcatgggctcaactcaagttttccgcggatacatggctgagagctgggaaatgccggtaggacttaagagcgcaggatatgcggctgcctttggtattctgtttgcctattacatcggagaacgcctgatttaccgaaaaaagcctgacggctcccagccgattgtcctgcgccgccggggaatcctttgggctttattattctatgtcccatatctgctttacggctttgcaggagatgtgatttttctgttttgggagaatgggcgcaaagagggagcggtgttttttctcgtaaaactgctggcctttattggactgtgcgtgaaactttataaaatgccaaaagagcgtggggcaacttcggctctgcatgggacaatccggccgaagttggacaacggtcaaaacgcatgggagctgctttttcgcatttgcgtcattggtttttttatcctgatgtggtcagagccggtctttttgagatttcagggatttattataacggatatcatatcgcttctgaaaccgttgatgcttatctatattgtgatatgtccggtgcatgggaaatataaggattaaatcatttcattttattcggcaccggtaaacatagcagttcgcacagccgggactgatcttcttgcagccatgccatgggttccaggttgccatatcacacctctctttctccggcgttttcccggactttgacattccccgtaaaaagctgtttctaattcaattatttatgtaaaactcaaatccctcaacattattcagccatgcataatttgcatattgggtcttgacaaaatccgaaatcggattcataataaaaccgaaatcggattttaaaactatggaggaaccattatgttaaaaacggtcaaagaacaaaacttagaattaaaccgcctttggagaatgcaggatcagttatatcaagcttacgctactcgctgcggtttgtcttccgtatccttttgggtattgtataccttaagtgaggcagatgagatctacactcaaaatgcgcttgccgaaatgtggtattttccgaagcagacggttaactcagcaatcgcaggtcttgtaaaaacgggatatataagacttgaacagattgccggggcaagaaacagtaaggcggtaaaactgacggaacagggattggatatatgtaaacgccttgttaatcctcttgtacatgctgagttgagtgcattattaaaaatgtcggaggaggaacgccgaatgttcctggaactctccgacaaacagcagcgtttcctgcgggctgaactggatgccgtttgtcaagatgaagcagtcgattttaatgcaggcagcaaagaggtgcaaaaatgaatttagagcaatgggttctatgccctttctgtaaaagcaaaacccggctgaaaatacgggatgatacagtattaaaaaattttccgctgttttgtcctaaatgcaggcatgaaacacttatagatgcagaacaaatgaatatatccgaaagcaaagagccagacgcaaagacgcagagccgataatccgtatattagatacgattatcggcttttctatttataaagtgaaaacatgaatggaggaattatttaatgaggattattacaatcagccgggaatttggaagcggcggaagagaaattggaaaacgacttgccggccagctcggcgttgattattatgacaaagaaattatcaccgctattgcaggtaaaaaaggattagacgaagattacgtgtctgatatattggagcatcacgggtggcagaatgtaccgctgactttttgccgttcccttacaacggtgaccgtagtacggtctgtcaaagccgatttattagtggaacagacaagagtaatcgagagtattgcaaaggccggaaaggattgtgttatcgttggacgaaatgcagatgaattgctcagggtgcatcacccctttaatgtttttgtctgtgctgatatggagtcaaaaattcgccgttgtatggagcgggctgaaaaaaacgaaaatttgtcccgaaaagaactggaacgaaaaattcgcagcattgacaaaaaccgtgctgaggttcgtgaaattattacacataaaggctggggagtacatacctcctatcacctgacagtcaacgccaccgattggaatttgaaggaattaacatcagccgttgcagcgtttgccgagagctggttccggaggacaaacccatgatacagctctctgatcactttaattataaaagactattacaatttacataccccaccattgtcatgctgattatcagctctgtctatggtgtggtcgacggttactttgtatcaaattttgtaggtaaaacaccatttaccgcaatcaattttatcatgccctttctcttgatattagggtgtgtgggatttctgtttggaacaggcggaggggcattaattgctaaaacaatgggcgaaggcaggcagaataaggccagtgagcagttttccttactcatctatgcctcttccatatgcggtgtgcttttagctgtatttggtatggcagcgctgcggtggattgcgtctgcattaggtgcagaaggccggctgttagaggacagcgttacctatggacgggtggttttacttgccataccggcgtatatcctgcaatgtgaatttcaatgcctgtttgccacggcagaaaagccgaaacttggtttgtacattgcaattgccgcaggagtaactaatatggtacttgatttcctgtttatcgttgtatttaaatggggattggttggtgcagctgccgctactgcaatcggccaattgatcggtggtattgttcctgtaatttattttagccgtcctaatgacagcctgctccgacttactaaaacgaaatttgatggatcggttttgttgaaaacggcttctaacggttcttctgaattgatgaccaatatttctacctctgttgtcagtatgctttataatgcacaattactgaaatatgccggagaagacggcgttgcatcatatggagttttgctatatgttgcgttactctttcaagctgtgttcattggatattccgtagggacagctccagttatcagttatcattatggtgcgaaaaaccataacgagttatcaagtttgcggaaaaagagcatctttatcataatcgcctttgctgttgctatgtttgcggcaggggaactgctgtcaaaacccattgcaatgctttttgtcggctacgaccagggattgatggatatgacgcagagagcttttatgatttactctttttcattcctgttctccggatttggtgtttggggttccagctttttcactgcgttaaacgacggagtagtatctgcccttattgcttttatgcgtatcctggtattccaggttgcatctgtgcttatattcccattgatttggcagctggacggtatttggttctcgattgttggggcggaattcatggcagcgattgttaccgcattgttcttaattggcaagcaaaaaaaatatcattactaaattgaggtgtatatatgaatttactgattaaaaccgttacttcagattttgaagatataaatgctcttgaacgtttaaataatgaagcgtttccagcagaggaacgcatggaaatcgatgaaatgatgcagttaatttccagacagataattgaagtgactgctgtttatgatgatagtacctttgtcggcttttatgcactgtctgtccgtaaacccactgcctatgtattcttcctggcgattgacagttccaaacgctccaggggctatggcagcaaagcgttggccttgatgaaaaaacaatatgccggttatcagattgtcttagatatggaagctatagatgatgaagcggaaaacattgagcagcgtaaagcacgtaaaagcttttatctttgcaatggctatcatgaaacaggttattacctggattataatgatttaataatggaagtgttatgtgcggatgaagaactggatgcagacagctttcggatacttttggataaattgaaaatcaggaagacgccgtttgtattggtccgaatgaattgaaataactaaacataattgaaataactaaacataaaaagatggagaaatgatttaaatgaaaaaaagattagccgcagaatgggaaccgattaagggagttatgattgcctggccagcatttcttccacacgcttatatagtagatttaacacagaattaccatgtctatctgtgtgtccccggccaggatgaagaaaataatgcaaaaaaacatttgacggaatggggcggaaacattcgcaacgttacattctgccaaggccccaggggtttgatgccccctgggtaagagattggggaatgcacccgatttttgatgaaagcaggaacttccatcttgctggtgcagaataccaaatgtccaccccttttgtagcgtatgagaaccctgaagtcatgtttgatggacaaaatcaaccgttgtcaccaaactcctatgagcaggaggaaaataaggcacagccaatgattgcagaacaaatcgggcagccatttaaaaaattgccctatgctctgacaggcgggaatatcatgtcagacggttttaataaaatgatgtcgatgcaagtcatcttgacagaaaaccgtgctaagggaatatcggaagagcagttttatgcaaatgtggcaagagatacgggcatggggactactccatattttctaattttggtgattatggcctgcagcatattgactgctatttgaaaatgattgatgaagaaactttgttggtcagcaggacccctaaaaatcacaagctgtaccagcggtatgaagatctcctggataaagaaatccgtaaatcaaggacccgctatggccggccatttaagattttccgtttggatattgtccctttcaacgagggacatgatgatctgactgcttatgttaattcggttatcttgaataactcggtatatgttccaatgtatggcattccacaggataagattgccttgcagcaatggcaggatgtattacccggatatgaaataaaaggatttgactttgagtttgcaaaagaacctgcagtcattactaatcgaaccgggtatacaagaactggctggggtacagaagatgtagcacattgccggacaagagcggtatgggacgaaaatatgctttatattgctgtcagaagattagaggaggaagaacctgctaatcaggtattagatattcatgttaatattgttgattacagcaaagccggattgattgaaggaagtctgaaattatattatcgggaagcagggggaacggaatggaactgccaaccgcttgaaacaacaaatgacagagaacttttcctcggaagtctgatgggaaaacccggcgatacaatcgaatattatgttgctgctgaaagcaagtcgggcaggaaagaaaccatgccaagagttgctcccaaaggcacttataaagtgcatataaggtaaataatctcaaacacactatatggagccgattaactgcaaatacttgggacaatcggctccatcaatgatatttgttcaaataaaacgaacgaggaggtcggatatgccagaaaaaattatacagcgtaaatgctttgtcataaataccgcttacattcttattgctgccatgcttgtgctgctgactattttaaccgcaggattgcttatgcctttttggattgctctctttctttccgctatattacagccgattaccagattgttaagcggaaaactgggactaaaaaagaaaggattatcaacaatcgtactattcctattttatctgctgctgttttgtatccttatctttggtatagcagaagttacaaatttgtttggagatttatttcaaagtttccccgactattataaagatactatcgtgcccgctcttggctctctgggtaactccattgagcagatattctccattattcctaatgaattccgcccggatatggcagagctgcaaatgagtataatgacatggatagaaaagatcgtatctgcaatttcacaatatggacttacctttgcaggcaatgtgattagtgggtttacttccagcattttgtctgttttaatgaccatattgctttcgtattttatcactgttcagtatgatacagtcgttgctttcttgaaatgccagctgcctgataaaattcgtacatttggtgcagacatcaaacccttattaaaaaactctgtagtgaaatatctcaaggcaacattaatcctgatgttcattacattcattgaactggcaatagggcttagtatcataaaaggaagcaatcccattggaatggccctgggaattgcaatatttgatgcactgcctgttttcggtaccggcggcattatgataccttggataattattgagctgttaagcggaaactatgctctggccggtggattgcttatactctacatcataattactatcatgcgtaatatattagagccgaaaattttaggatcacaacttggtattaaccctattgtggtacttcttgccgttttaatcggcggcaggctcctgggagttttgggaatgattttcttcccgattaccgcttatgttttgacggtactccatgatgccggtaaaattaaattatataagaatccacctaagttaaataatcagagccggatgcacagccgctaagccgatatcttcattgggagagccggccgttttcgctcccggcaaaaacggtgggaagcgttctctatttcagaccttccatcactgaatcaggcaaaatactcttcgataaaccgtgaagcgactgcaccgtcggcggcagccgtaacaatttgacgcagcggtttcgtgcggacatcgccaacggcaaaaacgcccgggagattcgtcttcgtcgtctcatcagctatgatgtaaccagtcccgtcgaggtcgacctggccccggaacagctccgtatcaggaatccggccgactgcaacgaatacggcctcacaggaaatctccttcgccggaccgtctaaagatgccacggtaacgcccgtgactttcttatcgccgtgtatctctgtcacccggctgttccagacaaattctatcccgctgtctatcaatgggtccatatagattttagaggcccgcaggctgtcgcgccggtgaaccagatatacctttttgcagattttagccaaatagagggcgtccgccgccgcactgttgccgcctcccacaacgactaccgttttgtcgcggtatctcattccgtcgcaggtggcacagtaagcgactccccgtccgcgcagctctttctccctctgcagccccaattcccggggagaagctccggttgcaagtatcaccgctctggcctcgatctctccctttgaggtggtgatttttttaatatcaccggttagctctgccgatttgacgctgacaaacgcagtctccgctccgaaacgttcggctcctttctgcatcttctctcccagctcaaagccgtcaatcccctcctcaaaaccgggataattatccacctgtccggtggttgccatctgtcctcccggagaaagctgttccagcacaatcaccgaaaacccgcttctcgcacagtagagagctgcggcatagccgcccggcccgccgccgataaccgcaacatcataggatatctgtttcatcatgtacctcctttgtaccattcctgccttacaatcctataaggcgccgttttctctgagccagtcttcaactgcatcctgtgaacccgggttgacaacagagctgaccagttcgccgtcacggaacagaagcagggaaggtatcgtgtctatgtcatacttctcagcaagttcaggttcctcgtctatatcaagcttcaccatcttaaccgtctcaccatgttcttccgacatgcgttcaatcgccggggaaaggcgtcggcaataaccgcaccatggcgcccagaaatccacaataaccggcccctttgcctttaataccgtctcttcaaaattatttttaatctcctgtactgccataatcctgtctccttccttaactttcctgaattatcttcgtttttatctgtaactttttcaaatacagttgttgtatctttataatactgttatccggacggattgtcaagagaaatatttaaaattgtacaaatccttctattaaaacaacgataacctgcacgctgcgcgcacaggtcaccgtcaaataagacccctggctatcggatacggcatacgttccgacggccaggggcctgaaaggttaagtttgattcagctcatggaaactgtctgggctttattctgcaaaaaccataatctgcagagccgcgttgtcctcatccgaccatacgacacattttctgccctgtgtcagatcatccagtgtcacaatgttccttgtgagatatggaaatatgttgcaatcggattccaccgtgtactctgtgccgtctgccgctgtcaggacggactttgaagtggctgcatccgtaaccagggactgcacttctatatagtccggtaccttcgcatcagcgggtatgttggcaaaaatcacgtctgcatttgtcattggagggaggctcatggtcatggccggcccgatgtatacatagatggtatccccatccttaatatcctcttccttaagcggaagtccggttacagcatcgaggatgtaagtatactcctcagaaacattgaggatgatctctccgctgatactcatatccgactggttgtcaatggacagcctgccatcctcctgctttgttaccggcccgtagatacggaggaactgaagtgcatcctgcccgttcatatcctcaacgttatccgccgcagtgtcagcttctgttgtctcctctttggatgcctcctggctctcctgacgggtttccgtggcagcggatgccccattggatgcgcagccgcctatgccaagcgccaaaaccgtacaaattcctgctgcatataaacgatattttctcaatattctcttctccttttcatggttaatacccgccggccctttaagccgtgcagagcatttatttacttgcaagtaaagtatatacgatttgccattcatatccaataaaaaatttcttaataattctgaatttatagagaacattgtaagaaatatttcagatttttcgcgaaattagatcatttatatcatccttctcctatctctttttgatgccatatacttttcaagaataaatatgcactgctatatttctgtactgagatattgtataattatctaaatcggaatttgaggagagtaaaaatatgagtaaagagtatatcatttcggcatgttcaggaatgaaaattgatgttaagcagggccaaagcatcacagtgatcgatattgaaggcggtcaagtagtggattttttcgctgaagcggacggaaatgagaatgaatttctttcagcaggagtgacgattgactgtaacgagtctctgaaaataaatgttggtgatattatttatacaaatctataccatcccatgatggaggtcatgtttgacgatgtaggagagcatgatttgctccatccatgctgccggccggaaatgtatgacttcttctattataatggcaaagatcatccaaattgctttgacaatattaacagagcgcttggagagcaacgtcccattatcacacccgtcaatttatttatgcacacgaaaattaacacagacggccgtatttcagtggaaaaaccgatttcaaaagcaggagataaaattatattaaaagctctgatggatattacattgggagttgccgcttgcagcgtttctgaaagcaaatgcaatagcgggaagtgttcccccgttaaaattgttgttaactaaaacaattcctgttaatttaataggaggaatcccgctatgaaagcaataaggacaccagtagcccgtactatctggtgtcctgtatattatacactatattcgctttttaattttgtcactccagaaatttactaatccgttccgccgcttcttctgcgttggaaagaattgccggatgccgtccttccgcaaatatacaaatttcagctcccgtttctccggctatcgcacgatattcgtcctgaaaatccgcccttgacatctcatcgccttcgcttcccataagcagaagcggaacctgcagactgtgaagcggctttgaaaataacggcagcttttctccagcacattggagcagggcttttgtatctaaatccacaacacgctcccagtcttctccctgacaccattgataaaattctaccgccatgttatccgttttggcgccggtccgttcctgaatcagattctttgaaaaatcatctgccaatgttctgccgtcaaagctgtccgccaccactctgccaaccagcccggggcgctctaaagcagtattgacggcaacccaggcaccgccgctcgttcccacaagattgaccttttccagctttaaatgctccagaagtgcgattgtctgtctggcctcctccatccaaagctctgccggaaattcctcaattcggtccgattttccatgtcctaaaaaatcaatgagtatcacatgaaaccggtcctcatataaaggcaaaagtaattcaaacatcctagaagatgccgtattgccgtgcaggaaaagtacgggttttccctttcctgattctgtgtaataaatctttttagtctgataataaaaatatgacatcctttgcctcctaatcgcttttcattcttctgctgcctgattagcaaggcttgtaaaacaccaacaccttgccgttagtgcttttttatccaaattcccatatttcgcaacctccattcctgatatacatccagtgtatcacaagatttaataaaatacactgcctgctccaaatatttccgcccagattggacacttactttacggttcacagccctgacaaaaagagcagttctgtgacgcttcttttatgtttcgcttcatcaatataccaggataaccttccttcataagcctgggcgcttctgtatatcagcggaccataatatagagtgatcacagcaaaacccataaatgaaatccacatgagcttttttccaaatggctttcgattctcaattacaccgtcctcagcctgcggttccctctcagctttcgtcgccctgaataccgctgcaaaaaataccgccgcaaaaagcattctacgcagctgattacaataagccaattcacaggatttcctttatcgtccggttgatgcgtctgcatttttcttcctctaatctgcacccgatggattctttgtcttcaatgactctcggtttctcaaaatccagaaccatcccttttgtaaaatccaatgccatatcatccagctttgacacatctccctttgcgataactgcaaaaaacgtggctgcaatcagataatcgccgtaaacggatgcgtgttgtccatccctataatataactcaatgtccggataacgctctctgattttcgcccagatacggcctatcggcgccagtaatgtgcctgtctcatttgccagttttgtgtaggtatcaatcatgttccgctgattttccggcttctctttttctgcccaggtcatatacagcaccggcgccgttcccacggatttacacagctttattaatctctctgcatgaggtatcgtctcttcctccggcggaaaaggatgtgcagcctgttgaatgacacaataatcgtaattcccatataaaagattgaaacgaacggagaaatactccttttcatgccacgccagcgttctgccggaataggcaatcatcgttacatctgtctctgcctctccggcctttctgcacatgtccgaaaacaaatgcggcatatcattaaaatacgtatggctattgccgataaacagcaccttcactcaacatcctcctgtctattcattctcgtttgggctatccgttccgtcaggacttccataatcaggacttcctcaatcaggacttcctaaaataaatggggcgcagcagcatagccaggatagccatagattctatgctgcgttcatgcttcggatttcaagcaaatctccttcatggccggctgcatatagcggatgacgtaagaacaggacattaaagcacaacgttcacttttcgctttttatcgggataaaaggcaagaaacaacttgatgtattccggtattcctgcaaggtcgggagagaagaaccaaaaggcaaaaccatcacaaaattcgtattgttgattgtgaatcgtatagctttttctatggctgcatgtaccgtcctctttcatattatgacaatgcttacaagctccataattaccggtaaatgcatgctgaatatagtctggggcctgttcaatagcctgtttctgactaattacattgctgaaatacatacggagaatcaagtcattatcccgtaaataaattcgggcatacgattttttgcttttcactccggcttttgtgtaaataatcatattctttccccagcaatatccctctcctattgttcggttacaagtataccccagcttctgcatttccgaatcaaacgccactataaactgcttgtccttatcatttacaaaatcgtattctttactctttaataaatcattcatcaatcttctccccgtctattaaacattatgttaccagaaggacctgatacaaattcagcatcaatctttcggattacctccattagaaatacctgaaccaatctatttatcaaaaagcttttaaataaccggacataataaaacgctaacaaatcaaattaatatataaccttaaaaactctataaacagctccaggttctcgttacccgcttcaaatgtaatagtttgcgttccttggagcgaacctctcacatcaacaataattttctgctcatctctgtcaaattccggtatgcaataaaattggctttcgtcatcgattaattcacactcttttttggtttcaaataaatatttatccgtataacttataaataataaaattacatcagcaaagtcctggacctcatcaatcccaggacaataaaaatcatgctccattgtattcctgactttatttatttttctcaatatcctgggtgcaattatccctaaccggtttaacagatcaatcttatttggtattgccatctttttcttatcagtataagcttttaaacagtatccatataaaagagattctatttgacaatccaacgctcttttagcattagataatgcattaattaaattccgcttatcttctccctttaaatcctcctccataaattcgagatattcatgtggcgtaacatcaaattttaattctacatcttcgtaacagcaggaaccccaatataaactctctctgcttaacatttgattgatataaactaaatccaaactcctacctccggaaattcaaataatttgaaatctatttattttctctcacaaaacggcaaggattcccgtatgctatcatatcacattatatctattagagcatcgttatctgtcagagtcatccgcgcctgcgctatgatttttcccttaaaagttgtcccgtatttccttttttgatgtccgcctttcataataaccggacgttttttaacaatactgaggtattatataacctattttttctaaaatctctattccggcgataattaaaggggctggggctttcatatatatcttagcactaattattaaataaagacacacacttttgatacatttatattttatttcctatcatcctgcgcaatcgtatctccattcccaaacacatagatggccccggctttcggacacacaaaaagcaccagccgttctctgactcgtgctttaatagaggcttattattaaaaatacagtagattagatactacaccggcctgattaaattgttttcaaaaaaagtgtcaaaagtatttgttgcgcctccgtgttcaacaatttttccatccactactttatcaatatcaacccctgtaatagtgagtttcttattcgttggtttaataccaataaactctcccttatgagtcccctgcataataaattcagagataacataatcgccatctgcatactgcttaataatgttcatagtgtagtccggataagtcttttttacatcggctaaatgctgtctcataccggctaatccaagcggtaccattttttctccaactttcagtacgcaatcctccgaaatatattgggaaagctcatccagtaaattatttgaaacaattacctcataaaaatattttacaagctttttcttctccataatactcaccttttaaactgtgctttgggtatcattcaagcagctccaatgctctcagatttccccatcacattaatgtaaaatcctaagaaccatcttctggcagggatactcaaatacagtcaatttttcatcatctgcaaatccacaagcatgataacatgccctggcaggtatcccttttgggtcgccgtcttggaatgtaacgacggaaataatatctcccacagtaaaccactccgtcattttctcaatcaatcttttagcaacacctttctttcgatactcaggatgtacggcaagaaaagacaattctttttctccccttgaacacataagcattcctgcaattctaccatctttttcttccataattgcttcatcattgctgatggcactatatactgcttctaaaaattccttttctttatacccggcaaaatcatcttttaccagttccatcatggatagtatttgaccttcatcgttctttgttacataccttatcatgatctttcctgctttccatattataaataaaacattgccccggaatccacatagtccaatttacaataaatatgccgtgccgcttttttcgacaaggaagatgtcataattaagtttaaacagcatattcataaacacggcgtttaacccagaacagatttcaccgaagccaacctattttcacatgctctcctctgtatattctaaaccattctcctggcaccactcaatcgccagttccctgtaatatttcgcctgaaaattataccactgctgtgtaatccccattctatcaatcatatcgtcaaatctcctgaacgcgccccgcccccgtatggcatagcccaattcttccgcctttttaccttttaaagtccagataaattcttccatgatatgatattcgtgaatttcaaattttgtcggaagccttaaataacgtcccaagttttcttcaatttcatgatccagtccctcattatccagaccagtaaccagttcatctacaaggaatacactttctcctgtttccagatccaaaaaatatgtgtaattatcatctgccatttcgatcgcatccaaaatgacatttaaatttactttcattgctaaacctcctgtcttttgtgaattaaccattaaatttaagactaataaaatgtggctgctcagctttttaaatcacggtttatttcaataagtataacataatgagaagaaagattcagtaatttttcactttcatcgtgaagtcctataatgaattttaagttctatcccctttcccctatctttggaaacttatccaactcaccacacgttaaaacacaactccatttgctccaaataattccgctttcccgtatagaattaaggtttccgcacgagaaacacggcggtttcaatatgtggtggaacggaggttttatactacatggcaaaagtattctttaccctctcaattcgaaataatttcccctcaatctgaggcaaaatttagtctaaatcaatttgctccatactaataccttcagtaaactcagcattctaaaccagttgtgttaacttatttaatcttgtacttcgttatctcacccaattgattaattataggttctacatctacgccaaaaaagttcattatagttttgccgccagccaaaataattccctttttactttcacctgatagtcttcttgatatttcgtctaatgtctgtcccatgttcccttctgccgctattcgaaatatttcaataaaaaactttcctgctgacctaattccttcctcggaactttctagttcaaatatcattttccttgcatttgaaaaatcgccccctaaatactccatcaatactaaagtagctgaaaaagggaacaaaacattaaaatcatattcaagttttttgcaaaacttaaaatattcctgttcatcatatttataatattttcccttaattgaaatactgctattatctgtttttccattgttatctcttaaaatatatccgggtatgtaaaaatctatattctcagatgactcatcatcaaaaacctcaagatagttaagtatatattccttagctttagcttgccttatgtcacaaagcaagatgccaaaataattaacctttcgccggccttcttgacctttaatttttcttaaaaatctttcataagttccaattggccacatattacctcctttaaatcatattgaactttataattatttctttcagaatttctccagtgctttctccacgcttttctttagttataacaaatataatatcattggccaaacgttcttttcccttacctaaccatggtaaccggaaacagattacatctcagtcaatcatgaaagaacacccacatattaagcccaaagccccggatcgctttgatttgcagctctttccgctccagcaaaaccactgtttccatattcctgtggacggaagttttataccacacgaggaaaatctacttacatctttaatatgggggtaccactctaccccgtcatttataaagattattattatcacctaatgataaatattatttgaatctaattttcactggtttttgggttatgggagtttaaccacaaatcataaatcttttccatatctacatctgatatattttcaaagtctttatctgtcaaccaaggattatctttaataagatactgatttagtcgtacaaattttgttgtagtatattttgaaatatcgctttgatttaaggcttgaataatccacaatggatataaaataaattggtatctaccttcaccataatattccaatggattttctaatctataataactgcagactccatcctcattaatatagaaattatagctcattttattttttgacctgtattgagaataagtctgtgcttttgaccatataaattctttataacttttatatagtgtattggcatccgtctgcatatattgataatcctcattataaatatagtatctaaattcatctctacatttataatcattacttaatagcacataatattggaatgtgttaaatagatcaatgtagcaccatagctgttgacaataactaaataaaatcaaattatgagttagttgaaaatctgtattcaactctatatacttgtcaaattcattaccagggtaatatggaattacttttgtattaaacttaatctctacgagctcatcatgatctccacctaatttcacattaaaggaattatctaaatattttttttcaatgccagaatgaatagcatagctaaaggcaattttagataaaccctgcttgaatatttcattttctagtttgaagtcattaaaaagaactttcgtattttttattgcatttctgagtctattgtctaaattatctaagccattatgtttttcaatatcaattaattcctgacttttcttcacatttgactttttaataacttctgcttgaactaatttctttgtatcttcattgctataaattgcatatccagaatatgctggtttactatttgtattattagtttttttaaatccttcaatttttgatgttaatgcagcgaacaatacacagaacttcttatcaaccaatttctccatatggtagttacacctatcacagcatattttttctgattcaagttttccccaagagcattttgaatgatatgttcactgcttttaaaaacttgagaataatctttattattgctagctcttttttgattaataatttcttttccgcaatatatacaatattctttcataaactactaccttccaaatatctgataacttttgccaaaacgtacattttccttaccccactatagtaatcggaaacatatttcacgccaaccaaccacaaaagcacacctacatattacgttaataaccccgaaaccctttgatttactgggccttccgctccagcaacaccaccgtttcaacatgcccagtcccccaaacatatccaccggccaagcctcgacagcccggtacccattccccataaaccaccgaagatctctaacaagtgtttccggcccgcaggagacatagaccacacgttccggacccatcttggcgaccgcgtcaatgaattccttcgtacttccgcttctgggggatccatcaaaatgacgtccaccttttctcccttttccgccatatttacgataaaccgtccggcgtcattgcagtagaactggatattcttcacatcattcatttttgcattctgtactgcgtcacggactgcatcagggttcaattccaccccaatcacctctccggccttcctgcttgcaatcaggccaatggtaccgataccgcaatatgcatctaaaaccttctcttttccggtcagtccagccagttgaagggccttattgtagagaagctctgtctgcgcagaattcacctggtaaaacgacttcgaagaaattctgaaccggagtccgcacagcacatcctcaatgtagcctctgccataaagcacgtgctctttatcgcccagcaccatgcttgtacttctattgttaatattctgaacaatcgtcgtaatctcaggatgcttctctctgagagccttcacgaaattatttttcgacggaaataccggcgaagccgtcaccagtaccaccataatttcccccgtggcaaatccgcgtctgacaagaacatgcctcaaaaagccatatcctgtatcctcatcaaatgtccggatcttgaatgatttcagcatccctctgatagtcccgataatctcatctgccttctcatcctcaatcaggcatttctcaaccgggacaagaatatgcgttccttctttgtaaacgccggagatcggatttccctttctgtcatgcccaaatacggcatgtaccttattccggtaatgcagaggctccttcatcccaataattggcttcaccggacagattccttttaagagttcctccatccgcttctgtttttcagcgagctgctgtttgtacggaaggtgcagaagctgacatccgccgcactgttcataaacaggacagggcgagttccttttcctgctgccattcccggtattttttacactttcctcattctttccgtctgctcttttattcccgaagcggtctctgccggaaaaatccttactgttttttccacgaaaagcttccttcacctgcttttgagagaagtcactctcccccgctccgcttttactgctgcctgctctgcccttcctcttatctgttccattttcccatttatcggctccacgcttcttatccgctccaaggctccctatgcctgtcccactcttccttttatccattccgctgttcccggcatccgccctgttttttctcatttccacttcattcttcccggtgtccacgccactcttcctcgtattcgctccgttcttccccatattcacaccgctcttcctcgtttccgccccattccccttatcaacgcggctcttccctatctccgctctgccctttctcgtattcactccgctcttcctcgtttccgccccgctctttctctcatccgctccgctcttcctcttttccacgccgctcttcctcttttccgccccgctcttcctcttttccacgctgctcttcctcttttccgccccgctttttctctcatccacgccgctcttcctcttttccgcctcatacttcccaaaaccattcccacttttctccatcccagcctcccttttcaatctcttccatttacatccacatattctcagaaaattcagtcttgtatctcatgttatccacatttatcgcccatttcatccacatttccacaactcgtcatctaaatcccagccaatcatccacaattgctaatttatccggctcaatcatccacacttctgaacacttttttccaccgttcttttttaaaatgcacggcaaatatcaatcctctgagacattcgtctattgccatagccacccagacgccctccaggccccagccaaatatgattccgaatacccatgccccgacaaaggcaactccccattgaaaacttacgccgactactgtcggtgtgaccgcatcgccgacggcgatcagacatttcgtcattactatattgacggctcgtcctatttccagaaaaatttcaataaacagaatcctacgccccagtgcaatgatctccggatcatccgtgaatatcagaaagatataattgctgcccaagaacagcagaaccgccaggcccacacaggccgccagagccaccttctgcgtcgcattcactcttttctggattaaatcaattttcttcgcccctatcagatatcccaatacaatctgggttgccgaagcaatcgccatcgcataaacataggccagattagcgaatatactgcaatacccctttgtgaccgtcaccatcgtgccgaaggaattgacaattcccaaaatgcacatctgtgacatattataagagaaactctccacaccggagggaaccgccagaaggcagagttttttcataatctgaaccggaaacggctttaaaaaccgcagtcccagcttcacgttagtacgcttcacaaacagcaggatcatcagccccagtcccaccagcttactgatatccgtagaaacagccgcacctactgccccaagcctcggcatgccgaaccagccgttgattaaaattgcgtttccaataatattcataacattcataacaatggaaactatcatgacttccttcatcatcgcaaatgccctgataatcgcggagaagattaggtaaagtccctgcactgtgatacaagccccgacgataagcagatacagcgaagcttcatcaaatatttcctccggcacacgaagtgctttgtaaagcggcttgtaacctgcaaataccagaagtgtggacagcaggcttaccaccgtgatcatcagaatcgacaccatacaggttctggacgaatttgccttatcctccgccccaaggtattgtgataaaattaccgtagctgccgtagatgccatgctgagtacaataatcaccagattcataatctggttcgcattaacaatggatgccaccgactgctgggaaacacggctgaccatcatctggtcaatatttcctaccaaaagctgtaaaagcagctcaacgaatattggcagtgacataaaaaacagattcctgttcgtattcattttatctatatcagtctgatgtctcatggttttgccctatctatccttattttatattgattttataatagcttcttctattgattttcccattacttcctcagttaaatcttatatatctgctatcaatctatcgaaatatcccaaacttcgttattatagtcgatatgccctgtcaaatcaatacaaacattgattaaaatattgctttttcgccgtggcttggtataataggagaacatatccgtttttccacgattcagcgctaattacaagtggacccgttaccggatatattacaaatactgaatttaagttacggtataaccatacaaacaatagaaaacgtcagcagactaaaaggagtaagaatatgaatccatcagccgcagcccatcaggctgtttcaccgaacgaaatctatattgatcagacactgtacaccggccgaccggataatttcactctccgtctgcccaaagaacagcgtgtttatactctcctcgattcactggggctttcctataccaggattgatcacgacccgacggagacaatcgaaagctgccatgaggtggaacggcttctggacatccgcatctgcaagaacctgtttctctgcaatgcccagaaaaccagcttttaccttctgatgatgcccggtgacaagaaattccgcaccgcagtattttccaagaaaatgggatgttcccgtctttcctttgccgatgccgcacatatggaggagtatctcgatatcaccccgggttctgtcagcgtcctcggcctgatgaatgatccggaaaaccatgtccgccttgtcattgacgaagatatcctgaaagatgaatatatcggctgccatccctgcatcaatacctccagcctgaagattaaaaaagacgatttaatcggcaggatccttcctgccattcaccatgaatacactccggtcgaactggagtggtgagagcagcttaacaattaacagcgaaaggcggccgccctatgaaattatcgtcatttttccacctggcctgtttcagtattaaaacaattcttttgaggcagaaaaatccgattctcggaactattattttgacagataaatgcaatctttcctgtaagcactgctctgtaaataatattaccgccgtcctccatccctaccgccaaatcagggccgagatggaaaagctgtacggtatgggcatccgtatcctgtttttttgcggaggtgagaccttcctatggaatgatggtgataaaacgatccgtgatctggtcagagaggccagagagatgggtttcctcattgtaaatacggtgacgaacggaacctttcccctggatttgcctgaggcggatcttatcctgctgagtcttgacggggataaagaaatgcacaatgagattcgtggagacacctatgatcggattatggaaaatataagaaatgcctcctccgataatatctgcttctatatggcaataaaccggattaacaggcatacggtccgtgacgtatgtatcaaagccagagacactgataacgtgcgggccgtttcttttaatttccacaccccttatcccgataccgcagagcttgccctttccagggaagaaaaagccggctgctgtgatgccattgccctgatgaaaaagcagggagctcctgttttcaacttgcttagcgcatttccgtatatcataaacaacagctttccaacgccctgccatcaatgtattgtaatggaagacggggaaatcagcacctgcggcagatgcatccacagtccgggcctgtgtgaacaatgcggctattttttcgtggcggaatataccctgctgttcagcggaaacataaagatcatagccgaacttctctgtacctatctcaaatacatataatgaatgcggtgtacaaatcaacattttttataagacatcagacaaaatgcatgtaagagtcagcgccaggaggatttatgggatttgtcactactatcacacggatgtggttcaccaggacgctccgtccgtttacctttaaaaatgaatatgattcccggttgaattacggggaatgcacgggacttggactttacgttcatctgccgttttgcagccagctttgttccttctgcccttactgcaaggagctgtattcggcggaaaaatgtagcctctacatcgacgctttaattaaagaaatccacctgagcgcaggacgccaaaaggagaagaagccggtcaccagcctctattttggcggcggaacgcctgcacttgcggccccccgtctgaaagaaatcattgatgctttgcaggagcattttatcattactgaaggcatcggcctcgaactgcatccggacaatgtgaccaatgagacgctccggcttttgaaagaagccggcatcactaaaatcagcatcggaatccagtcatttcaggacaaatatttaaatatcctgggccgccgcgcgttcgattgtaagcgcatggctgaggctttatcgaatttttcctttgaaacggtctcaatggactttatatttgcactgcccggtcagacatcagaagatttgaaaaacgatattgaaactgcctttgctaacggagccaaccatatcgcaatctatccattgattgacttcaccttcacggacagccggataaagccgctgaaaaagaaggaaaagagaaaacttctggatgaaatcaccctctactgtaaagagatgggataccgacgcgattccatctggaccttctccaattccggcaccgccggatattcatccatgacgagagataatttccttggttttggctgctctgccacaacacttttaaaggaccagtttaaaatcaacaccttttctgtggcggaatatcaaaaaaggattgaggaggggaaacttcccacttctctgactctgcgtttttccgaaagacagcgtatggtgtattacttattctggaccgcctacagtaccaaagtaaattcaaaagactttgaagtgtttttcaacacgcctctcaaaaaagcatacggccccgagctttggcttgctaaaaagctgggatttgccaccgaggagaacggggaatatcggatgacgctcaaaggagctttctattatcactactatgaaaacttttatacactttcctatatcgataaaatgtgggggattctgcgcagggaagcctttcctgaagaaatccatttttaatctgcctgacagcaggccgtttaaaaagccagaaagaatatcgctcgcgggattctccgcctggcgcgggccgctgtggcgacatgattcccaagcgccacaggcattggctcacttaacaggagtattttcccgttaaaaaagggctgtaaaaaacctccccaaaagaaaaatcgctgagttcgtgagacttcagcgatttttttagtatcattaattatgcggccggctgatattaccaataaaaatcatacaccacatcagttgaaattaccgccccttttcatcaatgaaaatctttctccaaatcatatcccatcacggtcagataattcttgattacagctacggccccatccacgccaatatgagtggtgttgattaccaggtcataattgtccagctcctgccagtcacgtcccgtgtaatatctgtgataatcgcggcgttccctgtctatcctcttgatattcttcaatacctctttctcatcgtaaagatccttttccctgattcttgcctccctcacttcgatgtctgcatacaaatagacgcggagcagtccctccattccgtccaggacatagttggcgcaccttccgatgatgacgcaggattcttccgccgccagtttccggattacctccgactggaaccggaacaggttgtcggcggagatcagatccgaaccaaaggagggagcgcctttttccggtgtcagactgctgataatcttatacagcagcttatttcccgccttctcgtctgccaggtgaaaatagctttccttgattccgctttcatctgaattcatcctcaggatattcttgtcgtaaaaaccaagtcccagttcttctgccagccttctgccggtgtcggctccgccgctgccatattgtcttccaatggtgataactacttttttccctgccataataacgcctccccttcacattgatcgacctttattgtatctacattataacacactatcccattgttttctatttattttccataatattcctaattctgctatccgcaaagcttcgcaataacacggtccgccgtctggcttgttgtagccgtgccgccgaggtcgggcgtcaggacactgccctcctctaagacagcctcgattgcggacaggaccctgcttcccatttcctcatggccgaagaaatccaacatctggctggccgaccagatggccgcaagagggttggccttcccctgcccggcgatatccggggcagaaccgtgaatcggctcaaacatcgatggatatatcctttccggattcaggttcgcaccggcggcaagccccattccgcctgcaatcgccgctcccaaatccgtcagaatatcgccgaacagattggaggtcaccactatctcaaaccgccgtgggtctttcaccatcagcatgcttgcggcgtcaaccagataggagtgggtttccacatccgggtattctctggagacctcctcaaatatctgatcccagaataccatagagtaattcagcgcatttgccttgctgatactggtcaggcttttcttcctcttccttgccagctcaaacgcataccggatgattctctcacagcctgtccttgagaaaacaccgtcctgtatcaccacttcgttgggctttcctttaaacagccagcttccgcttcccgcatactccccctcgctgttttccctgacaaagagcatgtctatgtcttcccgccgtacgtcttttaacgggcagggtgcccccttcagaagcgtgatcggcctcagattcacgtactggtcaaagcttttcctgattgtcagcagcaaatcccacagggaaatatgatccggcacgccgggatagcctaccgcaccaagataaatcgcgtcaaatttctctaagcggctgatcccgtcctcctccatcattctgccatgtttcaggtaatacctgcatccccagggaaaccaggtaaattcaaaccggaaacctccgtccagccgggctgcctcctccaaaacgctcacgccttcccgaatcacttccgggccgaccccatctcccggaatcaccgctattttatgtacatccatcctgtttctcctccctctttaccgcgttcttcatttacacttatcatactataccttccggtcgggttcaattccatttatcagtaacaattcagacagcataagctgtgttactgttacactgctctgtctattagataaaaagaagggaaagggttccaaagccggaaccggttcccttttcccagcggcagtctttccctgcatgttatcagtaaacagccgggccgtggaccagaactgtggaaaagccgtttcttcgcagctcctgttccattttcaccgcattatccatctctttaaacgctccgaccctgaccttatataacccgtcttccaataccagatatgccggaaatccttctgatttcaattcctcaagctgctgttcagccagagaacggatacggtaggctcctgtctggatcatgtaataatagttctcttcctgctgttttacaacatccagtatcccggttgcgatagctccggctatttcctcaaactgtgcgtcaaatttggcattgtcctcaggattatcaataaatccggcctcaacaagcgctgccggcatctgggttttgcgaagcacgaccagtcccggcctttcaaatgttcccagatccgtaaagccggttctggcaagttccctgttgatggactgcgccagctcagctgcaagtccttcttctttatacaccagcgtcattgtccctgagccggtgccgggttctgcggcagcattgcggtgaatggaaacaaagaagtcggcctcggcctcattggccatatccgccttttcatagggcgtatcatatacatccgtaacccttgtaaaaatcacttccactccgttgttttccaatatatcaccaacagccagcgccagccgcagattgtcgtccttttcctgtcttccttcgaaaacagctcccggatcgtattcgccgccatggcctgcatctataaccactctctgtcttatatccaaaagaaaaactcctctcacatacctttgtactattaaagtatgtgaaaagagttaaaaggttactgctcctgccgatgttggtaacagttcataccgtctgaactgttactgatattcaccgtggaagacttcaaccgcaggccctgtcatatagacggtatctttctcgcggtcccaggcaatcgtgagcgtgcctcccagcagctccacctccactgtatcgtccgtacagccggccagtatggctgccactgcaacggcacaggcacctgtcccgcaggccatggtttcacctgaaccgcgctcccacacgcgcatcttgacatgcccgcggtcaattactctgataaattccgtattggttctgtccgggaatctctcatggttctcaaagtcgggaccaatcttctccaggtcaagcgtctcgatgggctcctcaaattcatcttcaaacactaccgcatgcggattccccatggatatcccgataaaccgatagctctttccctttatctccaactcttcgaacagttccgaagtctgaaccggttttcccatatccacggtgacagccgtgactttcccattctccaccttcatatcaagatatttaatcccggatgccgtctccacgctgatacgggcttatccactattttgtgatcataggcatattttcccacgcagcgcactccgttgccgcacattgcgcctctggtgccgtccagattatacatatccatctgacagtcggccacttcagacggtttgataagaatcaggccgtctgagccaatcccaaagtggcggtcgctgacggcaatcgccatgctgcacggatcctccaccttttcctcaaaacagttcacatatacgtaatcattgccaattccctgcattttcgtaaatttcatcttttcctccctgagtcattgatacagacttaataccatccttgccgcctccgcaatcccggtgccgctgtccatgctgcacttctgcaaatacctgtgggcgtccggttccgtcatgctgtttcggctgatcaggacggctttagcctgggcaatgacctttgtgtcttcctcgcttctttcctgcggccggccttttctctgtctgcgtttctccgactgcatccgttcaatcatgcgcacgctggaaatcaggtcacataccttaaacggggccgggagacatacaatctcccccatattttcaccgctccattttgccggcgatgcaatcaggagcatatcgaacccggacggaagctgacggtaaagctgacggcaggtcatatcgccaaaccggaaaccgccgaccacaattccgcttctcaaatcgtccgcatgagccaaaacctgagaaccggaagtgcaggacgccgtcacttgaagtccattctttattaatatgtttttaatattccttccatcttccggtctggaaaatgccactatgatattgatcacacagtttcacctcactgtttcatgccacccccgtgcccctgttaacagcggtaaagatattctttcatctcccagtcggtcacatgggaacagaagcggtcccattcctcctgcttgccatctttatacatcctgcaaagcttttccccgaatgaagattttgcaaatgtattattctcaagctctctcaggacgactcccagagtctccggaaattcggtctttccatcgcgggcctccgtctgaagcttttgtacgattccgtcgattccagccgccgtaatagcagccaatgcgagatagggattggcagccggatccggatagagcgccgtaatgcggcagttgccttccttatcctctgaaaagcggaccaccttgtcggttccgtcttcccatgccgctgccgggaactccggctggaaaatgcctctctttcccgctgccagacgcttatatgaattaatcaatgggttggtaaagatcatcatatcccataaatgttttaatataccggccctgaaatatccggccgcctcccgggctgtcctgccttccttatccctgagggtgattccgacatgcaggccggaaccgtcgctgtccctgtccggttttggcaggaaggttgcatgaaggccgtgacgttttgcgattcttttaaccgccgttttaaatgtctggaggtaatctgccgcctctgtcccgcaccttgccggaatcaggaagccgtgctgacccggtgtaaggccgtggtggctgctttccgcctccatccccgcctccgccaggctcagcatgatatcgcggcgaacgctctccgcaagatcaatggggcctgcatcgtaatagccggccacctcatgcgtaatcgttgtcggccttccctcatcgtccgagtggaataggtaaaattcgcactgaaaatcaaaataaatctgcagccccagcttttcaagccggctcaccgtctccttcagaagtcccctggtatccgcccacgacgggtttccgtcaggatccatgacatcgcagatgactccggccacattttcctgtcctgaatcccacggcaggatctgatatgttgtcatgtcgggctttaagtaaagctccttattcccggccctgtcctttaaagtttcagaatcgggtgccgctccttcgcatctaaggcctcccagagcataacggttgattgcatagccctcttttattgccttctctgcctgccctccggtcatctccaccatcttgagctggccaaataaatctgtaaactgcagttttaacagatccacttcttcctctgaaaaacatccgtttcttctctctttttccatatccatatctccttaagcgaaacgacagcctgcacgctccgcgcacaggtcaccgccttcaacgccaaaaggagccgtaccggcaccggttcagctccccgacctgcttaaactatagcagtctgttttttttctgtcaattatttttttacctgcatggcgcgcagtttttccgtcatttcatttcccagggtgatggttcccacatggccgacctcgcccaccatatagaccgtaccgtcctctttaatctccacctcaaggattccgccaggcatatgtacatacatgttattgtccgcaagccccagccttagggctgcacaggccgccgcgcaggcgcagcttcctgaggccagcgtatatcctgcgcctctttcatatatctcaatctgtatatttgttctgtccagcacattcaaaagctgcgtgttcaccttctccggaaagtaatcggcattttccgaatgttcaccgattctgcatacctgatccttggatatctcgctcatccagataacgcagtgtggatttcccagggaaagacaggtggttacatacggtatcttcccgaacatcatggtctggttcaccatctcacggcgctcccctgtcaccggaatctcatcactccagaaagaaggccgccccatggatatcttaacccttgttccctcctcattgaggtaaaagacattctcctcgccgcttatcgtcatccaggaaacactggtcttctgtacatacccggcatccttcagatattttgcaaaaatacccattccgtttccgctcttaggtacctcgctgccgtccggatttaaaattttaacatacattttctcctgatccagatatggccccgcgagaatcccgtccgagccaactccaaagtttctgtcgcagatcagcctgatattctcctcattcagctccatctcattcttattcggatcatatacaagataatcattccccatacagtggtacttctcaaatgtaaccttcttcatcggcgtatcctcccaacttcaacgcttgacagcagttcatagtctgctctgccggctgccctgctgttatgccctgaggacattaacagacgcactcctctttatacccattatatactgatataaaataaatttctataaatattgtgcttcaaatcttacaaataatgctataatggtaatagtgcagacgggcggctgctaaagcaaattggagatttaactgaggttgggaggacgcgtccggaacggaccatgtccggtgtggtgagggatatgactgagtcttccgtccccgtgggaagttggttgtggagggggaatccggccggaatgaattgctgcgggtaccgtttgcactctttggagtgcgcagcagtgctaagctcgtgaggaacctcgccaagcaccggcggactcccatgtcccctccgcaattgattccgcctacttccccggggcagattttcgccggggagggaagactcaggcgaagatttttgcgacaccgaacatggtccgttccggccgctgattgtctctaaccttaaatggggaggaccctgtcgcggccactacgtatttccgactggctgatatcaaatcttccactattttttaataaaggtgcattgatggcttatcgtatttcccgcacacggaagcgctgagtggccgcgacaaggtccgcccccgcacttaacgcgtgagaccatcagcggccgcaggccagcggacggggccgatatacttggcggagtctttcgtcccggcgaaaacctggccttggggcggaggggaagataaagtctgcggatgccattgaaatccatcgctgattagcgaggtcctgtcgagcttagcagcgcgatgcatttcacagagcgggagcgtgctccgcagactttatcttcgcccgcagctccaaaccacgacaatctcccccgggacgaaagactcatttacacaccccgccaccccgtccgctggccgtaccggcggcgtcctcacctgcttaactaaatctccattatgctttagcaactgccccccgtccgaactgttacctataatgatattaccatgcgaatcacatcaagctcacgaaaggaggctgcctgcctatggattcttacgaaaaacgaggctatctggatcgggaattccggctgttccatctctcagcctgtctccccggcgatatctcctatcattaccatgactttgataaagtcctgatttttctccgcggagatgtggattatgtcatagagggccgttcctatcacctgaacccatacgacatcgttctggtcggccaccattccatccataagccgctgctccgttccggggatgtctatgagcggatcgtcgtatacctctctcccggttacgtggacagtttccgcaccgagaactgcgacttaagccgctgctttaaagacgccagggaacactgctccgatgtgcttcggatcagttccctgaaaatcagctctctctatgaaagcctgatccgccttgaaaaagcatgccgggaagacggctatgccaaagaactgtactgccgtattctttttctggagtttatgatccatctgaaccgggctgcgtccgggagccatctggaatatgtaagcaccagccccagcagcgaaaaggttctggaaatcatgcgctatatctcggaaaatccttccgccgacttcacaattgacagtctggcctcccggtttttcctgagtaaattccatatgatgcgtctcttcaaacaggaaactggttataccatcaacagctacataaatgagaagcgcctcctgatggccaaggaactgctgggccgtaacctgccggtaaccgaggtctgtttccgctgcggcttccgcaactatgccgctttccttcgggcatacaaaaaaaacttcggtgaaaatccaaaatccggcaagagaccggaaggacggacgtcagtcgataacctgcacgctccgcgcacagagcaccgccttcaaaaaaagccattgtcccagtaggtaattcatttccttctggcgcaatggctctttcacagtaacctttacaggccttattctccttttcggaatttatccacttcttttatcagcatcttcgtgttctcaatcatagagtcaaaggccccgtatttataaaaattaataaatataagaccaatcggcacagccaggatcatacctgcgattcctttcactttgtaccccatatagagcaggaacagcgtaatcagcgggggcagccccatggaatctcccacaatcttcggctggataatctgccgcacgacctgcgttgtgatatatatcagaatcagaccggccgcatacggatattctgccgaaaacagttttacgaccgcccagggcagcagaacggtccctgttccgaaaatcggcagaaaatccagaaccgctatcagcacggcaagcaccagactgtatttgactcccaatatcataagccctgccgccaggatagccgccacgacaaacatgattcggaactgtgccagaaaatagccgcctatcagccctctcgcgtccttcttcagatagtccacataccggaacacgaatggcggcagcacggccttcaagccgcgcagaatcttatcgcgctccaccaggaacagataggatgccaaaatcatgatgactgtgttcaccatgacgttcggaatgccttttgccacatttcccgcaatctccactgtgggagccgctgctttggagaacagcgcaccgatggttcctcccaaattatcggagatttcaagaagcggtttctggaggctgtccggcagataagtgaccagcttcctgctgttctcaatggcttccgtgatctcactcagcgcattgtcatacagcaacggcagatccttcacaaatcctgccatctccgtgtaggtccacacgactgccagatataacagacctatgacaaggatgagaacacccacgattatcaccatggaaccgtggcggcgcaccagctttaaatggcgttcaaggaacttaacaaggggatttgcaatcagcgcaataatccacccgattacaaacggcatgaaaaatcccagcagctttggaccaagaaaacacacaatacaaagacccgccagaggaattaaaatgtttaatatcattctgagaaatctttttgcatcctccaaccagaaacacctcctaaagccgtcagattccggcttacactgaatgacagatgaatactgaatcacaaataattgttaactgtcagcttaaattaaatggtaatgctccgctatctttttaaatgccggcagggagcgctcaatcttatcgtacgaaacacaatatgcaatcctcacataacccggacaggcaaaggaacttcccggcactaccagcacattatactgcttcgccgtctcacagaattccttttcattctccaccggtgatttcacaaagagataaaaagcgccttccggcttgatgcagtcaaagccataatccttcaggctgttatacaggagatttctgttcctgtcatatgccgccacatccacttcggcgtcaacgcagcgcttaatcaccctctgcatcagggacggggcgttgacacagcccagcacgcggttggcgatggtggcagcctgaatcacatctctgctgtcttccatctcatccggaattaccagatatccaatccgctctcccggaagggataaagacttgctgtaggagtagcagataacggtattatggtaataatttgtcacccagggaaccgtggccccgtcataagccagttcacggtacggctcatctgatatgaggacaatggaacttcccagctctttttccttcttttccaggatagctgcaattcttctgagtgtttcatccgagtaaatcacacctgtcgggttattgggagtgttgataataacggcttttgtctttccgtttattttctcctcaaactcctgcaaattcggctggaaatccacggtattcggagacacgacgacaagttctccgtcgtatccccgcacataggagccatattccacaaaatacggggcaaatgtgataacctcttcgccgggatttaagagtgtttttaaaattacattcaggccgctggccgcacctacggtcatcagaatatttgaggaaccaaatgacgtattaaaccgccggttcagcgactctgcgatggtctcgcgcacatcctcatatcctgcattggacatatacccatgtacaaaaagagaatcctcttcctctattatatccttaattgcctgatttacttcttccggcgccggaacgctgggattgcccaggctgaaatcaaatacattctcctgtccgtggatcgcggcaagcttctttccttcttcaaacatcattctgattgcagagttattctgcataagcggtatcatcttttttgaaatcatcacttttatccccttttctttattttattgtgccccatcgcctggacacggcaaacgcggctgctcccgtaaccgccagataaaaccaggttgtcggattgctgaaccaggttgtgaagaaagacagcatcatatagatcgcaatctgggaatagaacagatacataatcggattgcgtaccttcttcatcgcctgcatcatatagaaagccaaggcccccagtatacaggaaagtcccagcacaccaatgattccaaaatcatagtaggcgtcatagaatacagtcagagtggtcagttcctccttattgacgaaataagggaaattcaccagaccgggaaatttaaatttgagtcctgacagagtccacagcggcgccagcatcttgagtccccaggaatgacttcccagttcctctaccagacagttaaaattgtcataattgtttgccacatacatataaggctgcgtgataaaaatcggcatattcccgttcttcatttcaaaaacagcattcagatacgtcacatcatggcttctggccactgtcagcaggagataaagaggcactaatgccgccagggcaaaaaccgcatagagcaggttcagcctgctgtccatctgaatataggtcagcacagccaggattaccgcaaaaatcagctggaacctggagacgcacagaatcggtatggccagggcaatcaggcccagcacggctatgattgcgcttcccgctctgttccttcctctgttgatgcagtaatagatgacgcacagcgatggcaccagaacagatgaaaccgtgaaataatggatcccggtcagatggaaggccgaatatgcatggggcacgcctctgacaaacagaggcacatatcccagcgccgccgcctcaatcaggaaacagccaacggatactgccgtcaggccgcaggcacagaaaaagacggactgttcataatttccaaacgcgttaaaccgcatcgggcttacacgttccgtgccgatataatgttccagaaaccagaacactgcgtagaagccggcaaatgccgccagaaagcagagccaggtcattgccggccagtcggcgcccagacggctgagctttaagcatgccagtccctgtccgccgacccaggagagcgaaaaaagcccccgcagattcagcatattctctgttcttttatagtccattaagtaaagatatagggctgcccctatcagtccggcaccggacagatagaaatggccgctctttgcaaacagccatgcggctgcgtaacatagtgcgtaaactgtcatacttttcatcctcaacaggtatcttcctaatttttatcagttatctgacgtatcccgtccccgccgatatggcaggtgccgcataatcataattgtatcattacaaattataattatgcggcaccttgtcttctcagtcagaaacttattttggctcacaccacaccggaaaacagcgcgcaatcacggtttatcggccttccacaaaattcttcatgaactgctgtgtctcggctgccgtcacaaagcccatcgcctgttccgcaaccgccttcaattcttccacactgtatccggtaatatatttcctcgctttcagaattgcagatgcactcatgctgaactcattcagcccgaatgccagcagcagaggaatcataagcggatcgctggctgcctcaccgcacattcccaccatgattccttccctgcgtccgcattcgatgatgtggcggatactgcgaagcactgccgggttaaaggtggaatacaggtaggaaaccttatcattgccgcggtctaccgacattgtatactgtgtcagatcattggtgccgatactgaagaagtcgacttccttcgcaaacacatccgccatcagggatgcggctgccgtctcaaccatgattccgacctgaatctctttattataggcaattcctgcctcatcaagctctttcccgatatccgccaccagctccttcgcttccctgtattcttcaatacaagtcaccatcggaaccataatctttatattgccaaaagcgctggctctgagcagggccttaagctgcggacggtaaatatcatcctttctgtcaaggcagaaccggatcgcccggtagcccaggaacggattttcatcctttttaagccccatgtaaggaatctctttatcgccgccgatatccagggttctgataataacaggtttccccttcatcgcgacggctacctttttataagcctcaaactgctcatcctcggtcggcatctcgttccgatccatgaacagaaattcggttctgaaaagaccgattccttccccgtcgtaggcaagcacccggtccacatcctcgggctttccgatgttggccgctatctcgaccgtcactccgtccaccgtggtgctggacgttccgatatattgcttcagttcttctttttcctgtaaataggcatcccgtcttttctcatactctgcaatcaggtcactgccgggatttacaaaaatctctcctgactctccgtccagaatcagttcgtcgccgtccttcacctcactaagaattcccgatgccgctacgacagccggaatttccaaggctctggacaggattgccgagtgggaggtgcgccctccaagctccgtcacaattcccgccacattatcggggttgattcctgccgtgacagacggtgtcaggtcctccgccatcaggatagttcccgccggaagaagggatacgtccaccgactggactcccagaagaatcttctgcattcttgtcttaatgtctctcatatccgcagctctctgctgcatcaattcatcatccatggaagcaaacatatctgcatacatattgcagactgtctccaccgcaaattcactgcagaccttatcgttatcaatctgattctcgatttcgcccgtcagcatcggatcctgtaaaagcattaaatggccgtttaaaatctcagcttctttctctccaattctggatgccatgtcatccgcaagggcgcttacatccgcaatactctgctccaccgcacttttaaaacgttctttctctgcttcggcatcctcgattccggtattttcaatcactaacttctcttctctcagaatagctgcttttccaataccgataccggcagatgcgcctgtccctcttgccattgtggttcctcctctttccggatttctttactcgccaaggccgtcgttcacaatattaagcattgcagacaatgctgcctcctcgtccttgccgtcacatataaattcaatctcgtccccgcacttgatacaggcgcccagaacgcttaacacgctctttgcattcgatgttgaatttctgaagttaaacataatggagcagtcatatttacccgcttcattacagaaaatcccggccggcctcaaatgaaggccggttggattcttaatttttatttttgccttaaccatgacaaaataacccctctttactattctgatttactttctgccggttttgtctccgccgggctgctctctgcagctttagtctcttttgtttcgtttgattttgattcattcggcttagtctcgcccgtcttcgtctcttccgcagttcccgaaacctcgtcggaaggtgacttctcggcaatcgtcatagtcgccttcggataggcgattacttcgaatgcatcatccaggtcaagggccgcctcgatgtcataggttccttctccaagaccggtgacatcggcatgtatattcatctttgcggtggagagactgtccagatcctccttgagtccccgcaccctgatttccgccttatcgctgccaaacgtataggaataattatcggacttgccgttcagcgcaatatccttcgtattgaccgtaaatgtcttctcccgcagcggctctactttcagagtcaccgtgatcacggtatcgctcataccggctatcgtgatattcggttccaggaaatctttgaggtcaatctcgcatgtcttgtcagaagtcgctccgtcgatattcagcagcggatcctgcaccgtaagtgtactgatacccgccagatccgacttaagccctgccacggaaacattcttgacagaagtctccacacccgtatatttatatccctgggcaacctcgcccgtgacgacaaaatcaagcggtatcgtcttaaccttcagtatctgcatcgtgtacgtgatatctccgcccagcaccttgaccttgtcctggagatcattcagcttgttcccattggcatcatagaataccggtgtggccgtgccgatgacatccgagctggcccctcgatcggaaattcgattccaactccgctgatttgtcccacctgggatacaggtcccttgacatagacgtgatccggcgacatggtaatttcacccggctggtatccgtccgcctgttttccatatggattcggcaccagtgtaaattctttcgtctgcaggttttccgtctgaatcttaatgacttccggtgatttgaccgtcggcgccgtctcaaagaggtcgctgttgttgaccacctcaaccttgacagggatcgccccggtgacatcatacatctcggagagatcggcatatgccctgaaatcactcggtttcaccttatactgatccttggttctgatacggtaggtaatgactgccgttttcttgcctacgatctcatatgtcaggttcgctttttccaaaacctgctcattgatcggctctacagggacttctttggtccctgtagtcaccggattcgccacatttacgacggccagccagacaaaaaatgcacagagcagggaaaccagcttcagtccggaatttttagtcagcttttctttcattcttccgccttcccttccaaatcttaaatctgcccgtgtttgcgtcttcgtgtttaatcaatgtggacagaaggctcctcagttcgtctccgctggctaccctgcgaagctgtcctcctgacgccaccgtgacccgtcccgtttcctccgaaacgacgatggtcacactgtccgaagcctcgctgactcccacggccgcccggtgtctcgtacccagatccttgctgatgcccatattgtccgacagcggcagataacaggttgcagccgtgacacggtttccgcggatcacaacggctccgtcatgcaaaggcgtattatgttcaaatatattaatcaaaagctggctggtgacaatgccatccacttcgattccggttctctcgatctctccgagaggagttgatctctcgattaccatcagggctccggtcttaaccttgcccatctcaaagctggcccttaccagctcattgattgtcttctcattaaaactttcattcttcttcacatcatcggccgtgaaaagattggtcaggacattcttgctgccaagctgttccagggcttttcgcagctccggctggaatatgataagaatcgccgtcaccgcaatataggaagtcttctcgagcagccacaggatggtatccagctccagtatggccgctaaaagtacgaacgcaaaaataaagagaatccctttcagaagagtccatgctcttgtattcttaatccataccagcatctcataaacgactatcgtaatgattgcaatctctaagaagttcttgaaagtaatctccggcacaaatgctatccaggaataaagttcccttagaatctctgccatgcgctcacctccttctgtcattcattctaacttgccgccgcacgttctcagtgcttcggcgttctgcgcgtattaatcttctgtacctttacctcaggcttagttaccgcaattttgggaaccgccttcacataataatagtaatcgtcatcctcaaactgcacgtactccgttctgctatagtctacggcaaaaacgaagaagtgatacactcccgcaaccgctgcggataatataatggcaattataaggcccggcaccgataccgacacaccgaacttaaagtcaccgacaaatatcacaatcagctggataatggaaccggccgctatcgccgtcccccaggagtaattaattgaaagatttttcacgacatggacgaccaaaacgcccagacatcccgccgctaccatgacaagcatcgtctgattgccaatgaggcttttcacaacctgtgcaaatacctgcgtcatctctacctgttcactgcccgccagaaaactgctgttctgcttcacatacataatcacataataaataaagataccgcagctcatcggtattaccgaaaccaggctgcccgccaggcccaccagaatcggaatggcaaacggaactttaaaaaagaacaggatcggcgttgccagaagcagaatactgtctcccggctggaatccatagtaaagcaggactacaatcagcaggaaaatacaggtaatcaccgcaacctccaaagatgcggcataaagctgtatcaaaagaaatccgcctgccagaaacgcgatcgtcccatacggcagacaggtggatacaagtcctatagccaccggtacgaaggggcctgaaatcttaggcataaaaccggcgttcctgttaatcagaaagatggcggtaaatcctacgataaatttcaggacaggaattacaaatgcgctgtttttaccgtaaaatgctttgagcctctccttaaaaaccagaagtcccatcatacgcgtctgccctccctcgcaagttccctggaacggctgtggtaatcatagcgcttgtccagatgctttaatttcgcaatataaatacggttttttctagcctgataatcgtatcgtttgccgtaaataacgcagattagcgccatatacagaacaagccccacaaggtaaaccgccccgcccttccaggcaagccctgtgagagcgtcgatacctatggtgctcaggaaaacatccatattaaataaaacccagatagccagaatcatcacgcagcagagagtatagctgataaaaccgcgaatcatgttccggctgatataatcacttttgaagtaactggtaaccgcctgcatcctgccgccgttctttttctcgaaaacagccaggtcggccatcagcctgatcttctcttcattgagcataagttcactccccatttaccataaacgtatcaatttattatagcataagttcaggtaaatggcgagtgtcttaaataattttcataaaattgtaaataaaatgaaaattcgctattatttttctcatttactcatatcgcagcgcgtcaatcggatctgatttcgccgccttggaggccggataaagtccaaagaagattccgactacagcggaaaaagtaaccgccaccagaatgactcccggtttgacaatcgtcgggactccgatggccgcccccaccagagtgaccaggccgccgcccagaagaatccctatgattcctccgcaggccgaaaggatggcagattccgtaaggaactggatcaggacatcccgggtcctggcccccagcgcttttctgattccgatttctctagtccgctccgtaaccgaaaccagcatgatattcataattccaatcccgcctacaatcagcgaaatagccgcgatgccgcccaccgccagggaaagccctgccatcatggaatccacctggcccatctggctgatcgccgtctccatatagaagtccgactttttacggtctttcagctttgccacataactcagcagatcgtcataaaatgtgttcagctcagcctcgctcatcgacgtgtcggcaaagaaatgacagtaatagaagtgatcattgggccaggtcagcagcgtccacggaatatgggccgttcccttatcacttggcgtccccatcatcagcttctggaatgcgctcatcttcttctcatatacacccacaacggtaaactctgctacgttgccgaacagctccgtgcggaaggttttccccaccgcatcctctgtcccgaacagcatctttgcgctgtccacatccagaacggcgtttgttttacgcgctttcacatccgcctcattcagatatctgccgtacagtatatcaacaggctgtacgtcgatataattataatccaggccgctgaaaccgaattttacctttttgcgtccggcaaccgcatcggcggaggtactcatggcgctgtcaatgtagctgattttatctccaaataccgatttaatcctgctcagctcatccatggtaaaataatcgctctgcctggtgtcgtcaatccagtatccaattcccagatacgcctgggtaatgccaatatcctggtaaaggctggaaaacatccccctcatcgtgtcgccgatggatactatcgagataaccgatccgataccgatgatgattcccagcatcgtcaggaacgacctcatcttgttggctctgagcgcggaaaatgccataatcatattttctatcagcatgactccaccttcttcccccggctctgtctttcctcacatcgctgacaatctccccgtcacggaacttgataacacgatccgtgaatgccgcaatatcttcctcgtgggtaaccacaaccacggtggcgccttcgtcgtgaagcttggagaacagatccataatctcgaccgaagaagcagtgtccaggttaccggtcggctcatccgccaggattaacggcggctcattggccagcgccctggcaatggctaccctctgtctctggcctcccgacatctcgttgggcatatgctccgttctctccccagccccacgcggcccaaaagctctaccgcacgttcatgcctcagtttcttcggcatatgggcataggtcatcggaagctccacattctttgccgccgatgttctggaaatcaggttaaacgactggaatacaaagccaatcttctggtttctgattctggaaagctgatcctggtttaatgcggagatgtcaattccgtccagataataatgtcccatcacaggcctgtcaagacagcccaggatattcatcagcgtggatttacccgagccggactggcccataatcgcaacaaattcacctttttttatcgtcaggtttatatttttaaggccgattactttgaccgcccccgtatcatataccttacagagattgacaatcttaatcagctcgtctgtatctacctctggaagctcggctttgcggtccagcctcttcctgattctggtctggagttttcttctgtcaatcattgtctgtgcctcccttattctgctccgtcactgtgtgaacggctccctgcaaagctttactcatcgctttatttctcatcggagcgtcaccgccatcccttccgtgagtcctgccggagatgtcacaatcatcattccctccgtcagtgcgccttcttccacggcattcacctccacggaaagatcactctccactcccgtcgtaacaggaaccatatgtaccgtattatctgagctgttgacaactgcaacgctgagacttccgtcctcccctgtcacaagagctgtctgaggaaccgtaaagacacctttcgcttcccctgtcacaagcgacgccttggcggtgatgccggcaatcaggccgttggaagcgcctcccgcaatccggatcgtggcaggaactacacgctccgaggagccgccgcctttttcctcacctgtcggggaaatggagacaacttcgccctcctcgctttttccgttcagaatatcggcgtcaatctgcgccttctgccctacccggactttcgaaatggaatattcgctgacggcgatttccatctccagattatccaggttctccacaatgaacattggcttctcatcctcaggcttatccgcgaactggccaaccttcgaattgacacgtacgaccgtacccgtaatcgggcttttcacctcggcattttccagatccttctttttctgctccagctcgaactgagccgacttcacctttaattcataagatttatcgggcatcgctttccccttctccacagtaaaggaatccttttccctggccgcgtctttcagggtgtttccggccgcctccaaatctgcggaggagatatcgccggcatcgaataatactttgtttctgtcgtaattcagcttcgccgtgttataatcctggactgccttctcatatttatgctgtgtatccctgatattttcattatactcgctgactgccagatcgtaagagttctgggcaatatccacagctttctgggcgtcactgctgtcgatcagggcaagaatctggcccttcttcacgcggtcgccttcctttaccataatctgaagcacctctgcatggagattggaaaccacatctgcgctttccgtgcccgaaacaggcccgctaagacttaaaaccgcagtcacatctccttttgccagaggagccgccgccacaacaggggctgtctgcttacttccccgcatgcaattcggcttataataaacagaagaaggagcgtgctgcctcccgcgatcagcatctgttttttcgtccagcgggcaaaccgtttctttttcttcttgccgccgctgtggtcttcgttcatgtagtccaaaagttcctgttccacttccgacacgtctttttcctctgcaaagtccggctgctctttttcattattgtccggcagttttctttccaccgcatcatttgtcacgattaattcttcattatcactattctttttcttatgccacataattcagctccccgtttttatttattttacgactatttgtgttctaccataataaacgaagtatgacaaaggatcacttcaagatcaatatgatattgaaaaagttcagaaaaacgtaagaaaaggcatagtttactggcaaattcaggataattgaaaagatccccagggactatcctccatccatcgccaaaagacccggggctgccataaggcagtcccaggtcttaatatgactgtgcggacagttaaatctgaaactctccggctttgataatcaactggtcatccagatacagatccggcttcaatatgatgccatccatatggcagtccgctttcacggtaccaccgaaggatacgttagtgccgaacgcgatgtggacggttccgtataccttctcatcctccaggatgattccgcagagaaccgctttctcattcgttccgattcccagctcccccagcgtggcattcctttcatttgccagcaggacggacagctcttcacttctctttccccggatctccttcagcttaccgttctccacttttacatagagcggctcgtccagttttccgagtccgaccatggaaccgtctatcttcatctctccgttggagccgtcctccaaaggcgcaatgtaggcctcccccgacggcagattcccggctgctcctttagtcctgtaaacgcctgtgcttggaacaccctttctgccctccaaatcgatggtcagcacatagccgtccttctcaattcgagccgtctttgcatctgtcaggagctttgtcacctgcccggtcagcgcctcaacacaggcgtagtcggcagtcatggctccgctgctgagcatctcctccgctatattcggcatggtcccgatacgcgccccgttctttgccgcggctatctttgcattcgtatgcgtcagggattttgccgtcgggcagagcaccacgtcggcgttctgcatcgcatcggccaccggtcccggcggttcctgccccgaataattcctctccttcatcgtcatgagcagcgcctcacagcccagttcctttgccgcctcatagaacgcctgccctatggcaagtttgttgtcatccgtcactatcagtacattttcctccggctttacatccatgcagccggtcaggatattctttgcacagcttacgatatccattccaccgtcttcctttcgcctttctatatctttatactcttaagatgcggctgtcttacggttccctggccgcattttctgcctggcagccgcagccggtcatctctcccgcgattcttgcgagcagtgtcctggagagcaccaccggtttcccgctcagcgcctccacctcttttttcatcgccgcattatagccgatacagtcaagcacaattaaatcgaccggctcccgcctcatctgttcggccgcctgcaaaagctccttcggatcaccgtaaggagaagcggccaggacctttacgttccgtaccagcttttcccacttctccccagcctgcaatatctgctccggctttggcgttattacgccgatactagagtttggagtcagaagcggcaccaccgcattgagaagcttatatggaaaaattaacggaacacggcttttaaagcagtccggaaacctgccggtacagaaaaacaggatgagctgcgccccctgctcttccaatcgcccgatacaggactgcagctttggaagaatatatttttccgcaaatacgaccgaggttccgtcctgaagctttgatatcagcacatagtctccctgctccggttgaaactgcgcgatttcctctttcgatagtccgtccagtccgcctgcctgcagcaaaataaccccttcacccaggaacgggaggacatcgcatgtcacatcctccctgggagcctggcctatggtaattgcccctatcttcacgcttgctccggctcctttccgtccagtgtcttaaggcggttcatggaaccgtaaagctccctgagcctgccgtactcttcctcatcgaacagtttacattccccgcgcccgaacgctttggccgactcgagcataaagcgggccgcctcttcaagatcaatgatatggctggccccggtggcgcatcccggaactgccgtctccgtcgtaactgcaactcccacaaccggggcatccgtcgccgttgcgggctgcaaaatgctgttcagatggtatagcccattgccgtaaggcgtgatgtcctgcatggacagcgcgaacacctggggaagcttcccggtggtaatctgcatcagatccagaagatcgtcgctcacctttaaaatatacccctcttttaccgtgggggaaatggcaaatccccggtggttgataatcctgttgccctttgttgtgtccacggaaagaatggcatccagttccccgtccacctcttccttattgacctgggacatctccaccggcgaccccataaatgccaccggcttatggggctttgtcggtgcatccggacagatatgggtggatatcaccacatcaccgtccagataatcgccctttttctgcatgtcgagcagcttggctgccaccgccagggcaatcagcgccccgtctccgtcggacacgaagccgatccgttccggcctggcccccaaacctccgagcctgccgagaattcccattgtgggggccgcttttcctgccgccttcccattgattccgggaacccggatccgaatcatatccgtctttccgccgtttcctttcagctcatagacggtgacatcggctttttcattaataccgagaagataatccttcaccgtcgctccgcaggccgtgctgctgtccaatctgtcgtataattcaatcagctgttttaataacatttctctctcctttcggctgccttatgataatccgctttaaaagaatgctttgaggacattggagaaaaatccgaataacccgtctcccgcaatgaagcctgcatcccttacttccatgaatttcgtgccgaaaatcatgcgtaccaccactgcaatcaggaccgcgataccgtatgtaggattgttcaagaggagtcccgtggcaaaaagaacgcctaccattttatttccaaatataatctggattgccgctcccggaacagcccaaaccaaaagttctttgagaatcgctgtatccgccccagccgaaacagccgtagcaaataccttgctgatcggaggcatgatatcctgtttcatgaacatcagggcaaagaacatcactaccagaatcccgatcacaacaccgataaattctatgataacctgctgtttccttccatacagctccctctccctgtcgccgccctttccgcggagaatccatcctgttttcaaatcgtaccccatatcggcaaagcaaggtcctgcggaaccgatataaccggtcagcactgccagtggaagcggttcaaatcccatgaagataccgagcgtcataaagatggtggtaatggcaaatgcgggaaaccagccggaatgcatggccgccattccgacaagcatcattgcaaccgttgatgagaaagccgcccagagaacccagacaaccatcttagccgggtccattccgctcatgataccggttaccgttgccgtaagcactgccccgagcgcatacgccccaaagcttgtgaaaatagtctttttagccgatcccgccgagacggtaatccccgcgtcggctttctcctcgtccgccgttttcttcttatctttaaatataatgaaaagggactggataagggcaacccctccggctccaatcatgataccctgaggaatattggaggcccccatatcaaagccgttaaaaatcgcggtggaatatcctctgagaatcaggccgatgcccaggccggccatggaaaaaatatttgcgataaacacaatgccgataccggccatcggaatcttcaaatagcttccgagtacgccgagcgcaagaccctcaatcagtcgttttcccttctttccgccctcgtccccggcctggatagcgctggccgtggcaacgcccgaaggccatgccccgtgtgccgggaaaatcttggagtcgaaaagccgtcctaccacaataaccgatattcccgtacctacgatacatccgactgccatcggcatgatatactccgccttgccgatgccgtacagtatgccgactgcgataaatccgcaattggccgccgagaaaccggcgcctgaaacgattgtctgaagcagattctgtctttccagggatcggaacttcgtcatggacgccagaggtattcttgcgagcagcatggcgaaaatcgcgccaatcagggaagtgttaggggtaactccgactttaccgattatctgcatgcagatgattgcggaaaggactgccagcaatataccgattccaataatctgcggctcaaatgcggatatattctcattttttttctgtagcaacgttctttttctcttctctcatactgttgacccaccatcctctttctcaattattttctgttgtcaccgacctcaggaaaggcataggaaatcatctctttttccaccgctttctcacatggaataaataattccggatccatcatcccggctcccagctttatccttgatttatctgctacgataacagcagccgtcattccttctctgatttctgccgatgtaaccggggtacccgtctcggcgtcaaaggtcataatcaaatccgggaaggtggcgattctctcaccattcttttcagccgtcatatattcattccagaaggtcagctccacatcaccgaccttaatcaccccagtatcaaagcctccgccgcagcgcaaatcaacctgctctacctttgcgtttacaaggatgttggctcccagaaaactgcagactgcgttaaggaccgcgcaggccccctgcgcttttgcttccatcatggcaaggcccagttctattgcctgcctcaccgcgccgcaggcgccattctctttcgcatatgccagggttacaggatttctcgcaaccgccacaaggccgtcggcctcaaccgccgtctcgcgaacaagccttgccaccctgctcaggctgcctccggccgccatctctatccggcgtccattctccctcttgcctccgactgccgcctgaaaggaatagtaatccggaattttatgcaggcccatagatcccatcacaccggtaggatgcgccctgccgttacagggtgcgtcaacgacgggaaggccgaggagagcgctttgcagccagccattgaccgaggcgcttcctcccgcctcatttgtaataatccctccagcccggattcccatcttttcacagagcactgtgaccacgcgcccgttatccatcggctccacccaggcatctgctgcggacggcgctccgacattggatacattcacaagaaccgtatcttcgtccaaatcctccgggtccacgagcgtaaccggcgccagttcaagccccagttttgccgtcctaagtcctttttccatggagccgcctccgcctccgccgagtacgcagccgcccagcacggcggcctccagatgttccattgtcaaattcagttttgccattgtatcctcctagtatagtaatggtgtagtcaataagaactacaagttaatagttacaatatctgttctaatgtctaatgaagctttatgcctactttggcctggatcccgacataacttattgaacacagattaaaaaatctcagctcccgacaggcggctgatttccgccgctgccctggctgtctccttcagataaaaatcaaacagctcctccttcatacctgcactgtatccaccgatgctgacacagccggccagtctgtcccggaaaccgaacaccggaaagccgatggcgaaaaggcccggtgataaaaggccccgggtataatcgtagcctcgcttcttcaccgcttccatctcttttctcagcttttgccgctccacctccggtatcccgagagaagtgcagtatgcctcccgttcctcttcctccgtaaaagccagaagcggccggttggaggcccctttatgtatggggtatactcccccaccttcatggaaagctgcaaatcatcctctacatccagcttttccacacacaggctctgcatatccactcggacggtgagaaatacatccagcccgcaattactcttaagcgtctgcatcgcgggatatgccgtctgtccaaggccctgggaacggatggcccgatagcccagaagcaggctcttttctccgagataataccgcttccccgccttctccatgcggaggaagccactgtcagtcaatgtataaagcagacggtacgcaaccgcagggcacattcccagcttttcggtgacaaaactcagggtgattccctcatactcccgaaagagatacagtacttccaacgcccgttccactgtctggaggcccttttgtttttccctgcccccgttcatcccttctcctccccatttttatttttcctatttgaggaaattattttcttatatagcaattatatcactatgataaattgttaaagcaaatctgtcaataaatttttaccgaataattatacaaaaaatagtaatgttttttataactttcgcaataattaaggtgttaaacgcaatctgacggaaccggtacgtccgcaagggcaaggcgccgcgcttcgaggcgggcacatcccgccgcctccaacgataaggcatgttatgcgatgcttcccataagcataacgataacctgcacgccccgcgcacaggtcaccgccatcaaaaaaaaggatatgccggccgcacatcccttctttaatctttatctgtttttaagcattcaggcgttgtcagaagactgatccgagccgaacagccggctcagctcccctgccgccgctcccgtctccctcaggtagagcgttagctgttcttccttcatgtcgaagcagtatcctccgatgctgatacagcaaaccagcttattccttataccgaagacgggaaagccgatggaaaataatcccggtgacaaaagtcccttggtataatcgtatccccttctcctaacctcctccatttcccgcttaagcctttccttctcctccgctttcatatcgagcgcttcgatatagccgtccgctttttcctgctccatatacgccagcagcggacggttggaagctcctttatgaagaggataaattccaccaacccgcatggaaagctgcagatcatcctccgcttctatcttctcgacacacaggctctgcatatcggttaaagaagtcaggatcacactcagcccgcatttatccatgagcctcttcataatgggataggctgttttctccagctcctgggaacgtatcgcgctgtagcccagcagcaggctcttctctcccagataatacttcttgcttgccttttcctgccttaagaatccgctgtccgccagtgtatacagcagccggtaggctaccgtagtgctcatattcatctcctcggccacaaagcttaatgttatgccgttatatttgtgaaacaggtagagtacatccaaagcccgttctactgtctgaagtttctttgatttatcattttcttctttcattatttaacttacctcaaatctttattttaagtttccgaatcacagtttctcttattgaatacctgcctctatgatataattttaaacgcccttctgtcaatctttattcctgcctgtggacagtaactaaaaccgccttccgctgtctgaaaaaagtacgtcaaactgtcggtaacgcattcgtgcgttttacgtgctgaaaaaaggcgatttgcttgaatataggcttaatatatattataatagcgataaagtaaactgaaaaagttggactcggaggacagttgtacgatgcggacggaagacatccctccatattttgagacggctcaaaaggaatatccgattgttatagataagataaatatgctcggctagtgctccaccatgttgaagcggcaagggatttgcgtcctttgatgattataagggagccgaaaaggagacgccatgtccggtcaaaataaaatactaatcgtggatgatgatattataacaagatatattgcaaagctgatcttcaaggacaactttgaggtgctggaggccgaaaacggccaggtcgcgcttaccctgctcgaccgccaccgtcaggatctggtttttattatttgcgacgtatcgatgcctgtcatggacggcttcacttttctgaaagaaaagaacaagtttatctataataacggcatacctgtcataattattacctccgtgggggatgatcagatcaagcagaaggccatctctctgggagccgccgatttcgtggataaaccgttagatccgggaattgtccgtttgcgggtcaataatgtcctttctaactatggaatcggctacgcatacaacgattccctccagcgcgaattcctggacctgattaaccgccagctccgcggaggcaccctgtgcatccgtgacacggccggctacccgattcactatgtcagcgaatccctggcccgccatctcggttatcggactgccgccgaactgatcgcttgcgtgaacggcaaatggtctaatctcatctgcctggatgaggtgtatgaagcagagaagaccatgcgccgccagctttaccataagaaagaattcatacgtgaataccggcttcggaaaaaagacggggaatatatctggattcgtgagaacggcaaatattcccacgacgaatcgaacggtaaaaagcttgttgccctctgtgtcgatattacggatacgaagaacgcggaggaaaaagcccgctataatgaacagcttgcaaacgtggcccttgagaccacaggtataagtatctgggaatatgattttaaaaacagatgtatcatccagggcgagaattccgtaaaagtacacggtctgaataccgtcgtgaaggacgttccccgctcactgattgagtcggaatatatccaccctgacagtgcggacgcctttgccaaaatgtacaaagacctggacaacggttccccggcggcggagggtatcttcaaaatacggagggccgaccagcagggctactggtatgagcatatcaggtataccaatacctttgacaaggaaggcaggccctaccgcgccatcggcatatccaacgatgtgacggagcagcggaacataattgcccggtatgaacgggaaattgaattcaacaaaacactgccgtcggatatcttcaccaccgcgcggatcaatgtctcgcagaatacaatcgaagaaatccacacggacatccctgaagaacaggactttataaacagtatcacttacaggcgttttccggaaatactggccctgatgcccggtatcagcaaggaagccgtcgattatttcggtactctttccagagaaaatatcgggaaggcttatgacgaaggccattccaccattacctatgaatttctgaaagagatgaacggcgttccggcctgggtaagctttgaactgcataccatgccggatcctttcaataacgatttgctggcctttgtatattacagaaatatcgaccggcagcaccgtgaagtggaaagactgaagcttctggcgcagagggaccagatgaccggtctttataaccatgacaccacgctggagcttatcaaaaccttcctggccggggaaggcgcctcccagaagcacgccctgttcatgattgacgtcaataaattcaaattgattaacgacaattacggccatatgccgggagaccaggttctggtcgaggttgccgcaagaatccgatctgtcttcagaagcgatgacatcgtcggccgtatcggaggagatgagtttatggcgctgattaaaaacatttcctcctgctctcttgccgaaaaaaaggcgcatgagctggcaaaagccacacactttgaatgtacggatatcaatattgatatcagctgcagcatcggagtcgcattatttaatgaatatacggccgattttgaagaattgtacaggaaagcagatgctgcaatgtacagagccaagcagatggacgggccgggattcacaatcagcgccgagtaacgataacctgcacgctccgcgcacagatcaccgccttcaacagaaaggtgggaaagtatcattaattgatgctttcccaccttatttgtcaattctatcagattttcacacaaattcagaccgcttaaactgttacgcttaatacagctttgctccggccggaatcctgtcgtccaccatcaaaagattcagcccttcttttccatcttcctcgtgaaccgccgagatcagcattccgcaggaatcaatccccatcatcttacgaggaggcagattgacaatggcgattgccgtctttccaatcagctcttccggctcgtaatactcgtgaattccgcttaatatcgtgcgatccgtaccgcttccgtcatccaatgtgaactgaagaagcttcttgctctttggaacggcagtacagtctttaatcttgactgcacggtagtcagactttgcaaatgtctcaaaatcaaccatttcctcaaacagaggctctattttgacattggaaaaatcaattttttccgctgctttttcctctgtgataactgtcttttcttctttcttagaaacgtcatttccgcccagtgtcttcatcgtcgggaacagaagtacatctctgattgcgtaggaatccgtaagcagcataatgaaacggtccataccgataccaataccgccggtcggaggcataccaaccatcagggcattgacaaagtcctcatccattgagttggcttcttcatctcctgccgccagcagggcttcctgtgctttaaaacgttctatctgatccagcggatcgtttaattcggagtaggcattagccatctcgcgctttgtgataaacagctcaaaacgctccgtatagtcgggattctccggttttttcttcgtcagaggagagatctctatcggatgatccaggatgaaggtaggctgtaccagatgctcttccacaaactcctcaaacagcatgctgaggatatcgcctttcttatgtctggcctcatactcaatatgatactgatccgccagcgcttttgcttcctcgtccgtcttgatctgcgtaaagtcgattcccttgtatttcttcagggcatccaccatcgtaatcctctcaaacggcttctccaggtcaatctccacaccgtcgtatatgagcttcgccgtgccgagaaccttcttcgccacctcgcggaacatcgtctcaaccagttccatcattccataataatcggtatacgcctgatataattccatcagggtgaattcaggattgtgtctcgtatccacgccttcgttgcggaatacacggccgatttcgtagactctttcaagaccgcccacgatcagcctctttaagtacagctccagtgaaatacgcaatttaacatcttcgtccagggcattgtaatgtgtagtgaacggtctggccgccgcaccgcctgcgttcggaacaagcattggcgtctccacttccataaatccgcggccgtctaggaagttacggacttccttgataatccgggaacgcttcacaaacgtatccctaacctcgggattcatgatcagatcaacgtatcgctgtctgtaacgcatatctgtattggtaaggccgtggaatttctccggcagaatctgtaagctctttgatagaagggttacggcttccgcatgaatggaaatctctcctgtcttagttttgaataccgtacctctgattcccactacatcaccgatatccatctttttgaattctttataggattcctcaccgatactgtctctggcaacataagactggatattgccctttaaatcctggatattacagaaagacgctttgcccatcacacgtttggacatcattcgtcccgcaagagtcacctctttgccgtccatggtctcaaagttgtcctttacgtcggtgctgtgtgccgtaacatcaaatttcgtaatctgaaacggatcctttccattctcctgaagctccgccagcttttcgcggcgcaccttaagaagctggtttaaatcctgttcttccttcttattctgctctgccaatttcttccactcctttgtgaacttaaattatgatactctctggatttccagtatcttataatgaatcattcctgcctgtgtctctacctgaacggtttctccctctttcttgccaagcagcgcatggcctaccggagattcgttggagattttgttctgaaggctgttggcctctgtggaacctacaatcttaaattccatctcctcgtcttcttccacatccagaagtttaactttacagccaacgctgatcttgtcaaggtcaatctcgtcctccacaactacttctgcattcttaagaagcttctcaagagcctcgatcctggcctcgatatccctctgctcatccttcgcagcgtcgtattccgcattctcggacaaatctccctgctctcttgcttctttaattttctgggcgatctccctgcgtttattcaccttcagatcctgcagctcatcttcatactgcttaagacctgcatacgttaaaatatttttcttttctgccatgacaactatccttccttccgataattcgtctccgaaatcgttctaatattgcatcgcactattataactgataaagttccccttgtcaagaatcggaacctgcgttttccgtttatttacaagggttttttcgttataagcgttcctcaatcagggtaatcaattcctccatcgaagcaaccttgttgatgtcatttctaagggaagatgaattggggtaaccggccgtataccaggccacatgcccccgcatttcacgcatcgcaatgtgttcgcccttgaattccgtctgcagtctgccgtggcggataattgtcgcttttagctcttccctgtccggggaggcaaaagaattccggtatcgagataatggttgatacgcccaaacagccacggattgcctttggcgcctctggccaccatgacaccgtcacagcccgtcaggtcgatcatccgcttggcatcctgcggcgtaaaaatgtcgccgttcccgataaccgggattttaaccgcttccttcacctgacggataatgtcccagtccgcttttccggaatagtactgttccctggtcctcccgtgaaccgccaccgcagagacgccgcagctctccgccatcctggcaaactccaccgcattgacacaggaatcatcgaatccctttctgaattttacggttaccggtttatgaagctttttaaccatcgaggtcaggattgcctcggccagcttcggatttttcatcagagccgagccttcgccattgtttacaatcttcgggaccggacagcccatattgacatcaatgatatcataaggaccttcttccagccggagcgccatatcgctcataatatcgggatccgaaccgaaaagctgtacagctaccggacgctcttcttcccttaccgccaggattggtttcgtattcctgttattataaagaagtgccttggcgctgaccatctccgtacacatcaggccgcagccctgctccctgcacagcagccggaaggggagatccgtcactccggccatgggggccagtgtaacgttgttctccagttctacatttcctattcgtaacttcatctgctctgttcttctccgtcttcctcccgctcttccagcaattgttccgccggtatcccgaggataaatactttgtaatataactccagagattccagcagctcccgcttttccctctgatactgctttaccttaagcccgctgccaatctcatcaaagagatagtccgtctcttcagcctcaatccggaactccagcgttccgtccggagcaaattccagcatcatggcgcctcccacatcttccgtaaagagtacgcacataatacggagttcctccttgatcccctccggtagtccggcaaactgctcgttaaaataatatttttccacataggaattggcgccgcagagaacgatattctcctcatgcttaccacctgccgcattctccatcttatcctccatccgttacacatcaaaaggcattctgccctccggacagtatgcctttttcatatacctatcaatctttttgtcttttcccggcctgcaatccttctatcttaccagaagcttgctgatttcgtactgatcctccggaatatcctttgtcatattaagcgcttcctgaatatcaaagtcaacaaattctccgtgcttatacgctaccacccgatttgtctttccttcggccagcagttccaccgcttttgaacccatgatggaggcatataccctgtctttacaggtgggagcgccgcctctctgcatgtagcccagtatggttgcccttgtctccagcccggtcgccgcttcgattcttctggccatggaagcggaatggccgattccttcggcattaataatgatgtggtgcttcttgccccgcttcctgttctctataatcctgttaatcagcatctgttcgttgccgtcataccgttccggcagaagaatgtcctccgcaccgttggcaataccgcaccaaagcgcaatatagcccgcatggcgtcccataacctcaatgatactgcaccgttcatgggatgtggatgtatctcttaccttatctatggcctccatcgccgtattgatagccgtgtcaaaaccgatggtataatcggtacaggcaatatcaagatcgatggttccggggagtccgaccgtgtttacaccgagagcagaaagcttgcccgcaccgcggtaagaaccgtctcctccgatgaccaccagaccgtcaataccgtgtttcttacaaatctcagctccctttttctggccttcaaccgtagtgaattcgggacatcgtgccgtgtaaagaatcgtgccgccgcgtccgatggtatcggcaacgcttgtaccgtccatatcaacaatctcttcctgaagtaaaccggcatatcccctcataatgccctttaccttcatccccttgttgattgccgtccttacgacagcccggatactcgcattcattcccggcgcatcgccgccgctggttaaaacaccgatcgtctttacctcttttgtcatagtatattcctccgtctcgccatatctatcaacaaatactggttattccttaatccgtaactgttctgaaccctgacaattacctcaattcatcttattctaatgcatttttttcatcttttcaaggggtttatgatatttttttaactagaagggcgcgggggaagaaacatccctggacggcaggcgtctttcgtcccgattggtagattgtcgtgggttgggactgcggagaggatatagtctgcggagcacgtttccactcggtggaatgcatcgcgctgctaagctcgataaaacctcgctaaacagcgatggattccaaaggcgtccgcagactatatcctctcctccgccccaagggcaggtggtcgacgggacgaaagacgcctgcccttggggctcttcccccgctgattgtctctcttgttaagggcggagccggacttgtcgcagccactaattgcttccatatattggacaaaataatctaattgggaacgtgtagtggtcgcatcatatactcctcctcccttgaagctggagataatcagcgtccggaacggaccttggccggtgccgcgaaaaccttcgcctgagtcttcagtccccggcgaaaaccttgggctggggggaaggaggcggaatcaattctggaggggacatggaagcccatccgtgcttaatgaggtttcccacgaatttagcacggctatgcgcttcgataagtgcaaacggtccccgtaagaattcattccggccggattcccccccctcacgattcattccatcccggggacggaagactcagacacatcccccaccacaccggacatggtccgttccggacgcatcctccatccttgattctctaccctctccgtcctaccttatcaattgtcttctcgaggaccttcacattcttttcccccagttttcccctgagagcatccagaagctcttcctttgcctccacgttccagtttcttggaagcactttttttgccttctcttttcccaggtagataatcacctgatcgtttccttcgtagcccctgagcagatccaaaagctcctgctcccgggagaaataggcctccttatccggatattgaagccataattccctgggaacggcctcaaatgggattacctgctcacagattagctttcctacggggtcgtcgccgatagacgctttccctgttatgaatactttggcatcctgctccaggagatcccgccttttctcataatccctggggaaaaccagaacctccacactgccgtacagatcctcgattgtcacaaacgccatcattttattggtccgggtagtcttaactgtcttcgccgtaagcataccgccgatggtgacaatagcgccgtccctgacttgcgcttcgcctgtctcttcgtccactatgaaatccgacgtcctggcagttacattcttttcccataagccgatataggcctccatcggatggccgctgatgtatacgcccagcatctccttttcaaagtagagaagctcgtccttcgtatattccccgacgtttggaaacgtcacctggaagttctctttttcttcctcggccacgaaatcaaacatcgtcatctgcccttccatggaattcttcttttctttgttcttctgatcaagaagctgcgcggataccaggaatttctgttttctcgttcccggaagcgaatccatggccccggacttgataaaactctccagcgttctcttatttacctctttactgctcatccggtccacgaaatcttccagggttttaaattctccccgttcccggcgctccttcactatctcctccacaacggactggccgatgctcttgattgcggaaaggccgtagcggatggaaccgcctgagacggaaaagccgccttccccctcgttaatatcgggaggaactatcttcattcccatctgccggcaggccatgatatactcagacaccttcgtcacattgtccttgaccgaagtcatcagcgccgccataaattcaacgggataataatatttcaaataagcagtctggtaggagacaaccgcataggcagcggcatgggatttgttaaacgcgtatttggcaaagtctatcatctcatcgtaaatatggtttgccgtcttttcgtcaatcccgttggcaatacatccttttacgccctcctccccgttgccgtaaacgaagttctggcgctccttttccataaccgaaccttttttctttgacatggcgcggcgcaccagatcactccgtcccagggtatatccggccaaatcccttactatctgcataacctgctcctgataaacgatacagccataggtcggagacaggatgggttcaagctgcgggcactcgtaggttatggatttcttgtcgtttttccctttgagataccggggaataaagtccatcggacccggacggtacagggaaataccggctatgatatcctcgaggttctcgggctttaactccttcataaagctcttcatccccgagctttcaagctggaacacgccgtcgttctttcccgttccgatggcatccagcacgttcttatcattataatcgatattataaaggtcgattgtctttttgcaggttttttcggccagacgtaccgcattctggattaccgtcagggtacggaggcccaggaaatccattttaagaagccccagttcctccagcgtcgtcatggtaaactgggtcgtaatggaaccgtcggccgctcttgacagcggtacatactcatctaccgacgccttactgatgacgactccggcggcatgcatagacgtatggcgcggcaggccctccagtctccggctcatgtctatcagatacttgacttcgtcatcctcctgataggcgttccgcagatccgggctggccttcagggccttgtcgagtgtcattcccaaatctcccggaatcatcttcgcaatcgaatcacattttgcataaggcatgtccagaacacggcctacgtcacggaccacgcccttagcggccagcgtaccgaaggtcacaatctgaaccaccctgtcttttccgtatttgctcacgacataatcgataacctcctgtctgcgctcaaagcagaagtcgatatcaatatcaggcatcgacaccctctccggattcaggaaacgctcaaagagcagctggtaacggatgggatcgatatcggtgatccccaggctgtaggccacaatactgcctgctgcggaaccgcgtcccggccccaccataatatcatgggattttgcaaaatggataaaatcccatacgatcaggaaatagtccacgtatcccatggactgaataacacccagctcgtattccagcctctctttcagcgttccgtcatcgtcaggataatgcttattaaaaccgtcaaagcagagctttctcagatattcccacgaggtatacccctccggcacgtcgaactggggcagctttgtgacgccgaattcaatatccacattgcagcgctccgctattttatgggtattatccagggcatcggcggcgtatgggaaaatttccctcatctcttcctccgacttcagataaaactggcccccctcataccgcatcctgttctcatccgccaccttcttgcctgtctggatgcagagcaggatatcatgggactcgacgtcttctttataaatataatggcagtcgttggtcgccgtaagcgggatgcccagctcctggctcatgcgcagcagcccctggtttaccgtcttctgcgccggtattccgtggtcctgaagctccaggaaaaaatttccctctccgaaaatttcctgatagcggagggccgatttgcaggcctcctcatacatccctctggtgagataacgctgcacctcgcctcccaggcaggcgctcagggagatgattccctcactgtactcccggagcacttcaaaatccaccctcggcttataataaaagccttcgacaaaccctttggatacaatcttcatcaggttctggtatcccacattattttccgccagcaggattaaatgataataccggtcttccccgttcacgttctcccggtcaaaccgcgatcccggcgccacataaatctcgcagccgatgatcggcttgattccggcttcctttgccgcccggtaaaaatcaatcactccatacattactccatggtcggtgattgccaggctgtccatacccagctctttcgctctggccgtcaattccttaatcttactggacgcgtccagcagactgtattccgtatgcacatgcagatgagtaaatgccactccctgttctcctttcgcaggatgaaaaatattcttacttttcaccaattttaaaaggccgctgcaatagtttccctgcagcagcctgtgatgtaaaattaattgctctttaaatagttctcaatgccttccagcgcctcttcctcgtcagccccgtcagccttaacgagcacctcctcgccttcccgcagctgaagcgtcatcattcccataatacttttggcattgacacttttgtctccgttctccagataaatactgcagttatactggctggctacctgtaccagcatagcggccggtctcgcctccagacctgatgcaagtccaattgtaacttccttacttctcataatatcctcctcatcttctcaaagaacttacgccatcgctttcttacttttacggtcagcgcagtgagtgcgcagacctgtctgagctgttacctttttttactctttctgagctctgaggttttctgcgatcgtactgatctttctaagccgatggtttactccggatttacccacctggggatccaggctctctccaagctctttcagtgttgcgtccggcctgtccagcctgacctgtgcaatctccgccagcgtctccggcagataatcaaggccaactgtatcccggatgtaagtaatatcccccaactgctttacagcagccgaaactgttttgttaatgtttgccgtctcgcagttcacctggcggttgacactgtttctcatctccttcaggatcctgatattctccagatccatcagggacaaatgtgcctccatcacgccaagaatctccacaatctgactgccttcttttatatataccacaaaatacttcttcctgacaactattttcgcatcaattgaaaaagttgctatcatagcctgcagttgttttgccttttcctctgaagcgcagactatctcaaaatgataaaatttctccggatcgctcagggagcccgccgccagaaatgctcctctgataaaggccctgcggcagcacggattctggactaccagattcttcacaatggaaaaattctctgagacctccccgtgttcatccaacagcttgcatgcctccagaacacggacagagtcctcatgaccgcgtatcaccaccgtataagttctgttcttcttaaggaatgcattcctccggatagaaatatcagttcctatattaaatgcttttttcaataatgtaaagtattttctcgcaaccgccacattttccgtgtggatgcggatactgtaatgatcttcttcatcgatgtgaattctgccgcataaacttaagatggcggcaatctccgctatctggcaatgtctggcagagctaagctgcctggaaagttcttctttcacacgggacgaaaatgacatctctccacctctatttcctgcatacaagtctactgagccgttatactatcttttccgatatccctgtgctctatcttaagtccgatatccctgtggtttttcagcttttcatgcagcatattggcaatggtgacggaacggtgtttacctccggtacagccaacggcaatgacaagctggttctttccctcctgcacatagtatggcagaaggaagtctatcatatcataaagcttccccaggaaaatatcggcagttcctccctgtttcacaaagtcctgaacctctctctcattccctgtatggtaacgcaggctgtcgtcatagtaggggttcggaagaaaacggacgtcaaagacgagatccgcatcggacggaattccgtatttaaatccaaagctcaacactgttacgaacaggctggaaaatctttcatggtccagaaagattttttcaagctcccctctcagttcccttgtcaaaagcttgctcgtgtccaggatatagtctgcccgtttttttaaaaatctcagtttctccctttctttggcaatgccgcgatccagccgctgagttccggcaagaggatgatttctccttgtttccttatatcgtttaatcaaaatttcatcattggcatccagaaacagaatctcatatggaaatttaagccgatcccactctcccagagtattttcaagctggcacaattcctcgccgcttctcacgtcaatccccaatgccccgctctttatagctccgctgctgctctccaccagttccgcaaactttccaaccagcggaatgggaaggttatcaacacagtaaaatcccatatcttcaagcatcttgagagccgcagtcttccctgctcccgacattccggtcacaattacaagccgcattttcttttcctccggtcatccctctgtcttttacatgctgttcctgattacttattcatcccagccaatcatacgtacttccgtctccaggtccactccagatgtctctttcacctttttttgcacggagcggcacagtgaacggatatcctccgccgtcgccccgccgctgttaatgacaaaaccgcagtgcttctctgaaacctgcgcgcctccttcacggtagccgcgaaggcctgcatcctcgatcagtttaccggcaaaatatccggccggccgtttgaacgtgcttcccgcgctgggatattccaaaggctgtttatcccgccttttcccggccagttcagccatctttgtctgaatcgcctctttgtctccctgtttcagcgaaatcacggcggagaggactatgtattctttttcctggatgcagcttcggcggtatcccagctccagctcattggcggacagctccaggatccggccgttcttatccatcactctcacagtcttcagaacatttttcatctctccgtcataggcccccgcattcatgacaaccgctccgcccagcgtgcccggaatccctgccgcaaattcaaagcctgtcagggaatgctcctgcgcctctctggcgattctggatagaagggctccggcccggccgccagttcgccggacacatcctcccggatctgcgcgaatccctccccatcagaatcataacgccgccataccctttgtcgctgaccagaagattgcttccgttgccgagtatataatagggcatctgttcctcccggcagaggagaagcacttttttcagcgattcatcgccgtccggtgatacaaaataagacgccgggccgcccacgcggaacgtggtatgccggttcatcatctcatctctcattacctggccgtttcctgctgccagacacagtttttcaaaaaatccactcatattctgtcctgcctgtttattaatctttgccaaactctttaatcttttctcgcaaggttggcctgcacgcggttgtaaagctcccgtgccgcattataccccatctttttctgtctgtagttcacagccgccgactcaacgataatggcaagatttctgcccgggcggatcgggatagaatggcagaccaccttattgccgagaaattccgtatactgatcttccattcccagtctgtcatattctttctctcgatcccactcctccagcttaatcaccatgtcaatcgcctgcgtatcttttacgctctcaacaccaaacagagtctttacatcaatgatacctatgccgcgaagttcaataaaatgcctggtgatatccggcgcggaaccaataatcgtctcatcactgacacggcggatctcaaccacatcgtcgctgacaaggcggtggccccttttaatcagttccagagcggcctcgctctttccaatcccgctctctcccataatcaggacaccctctccaaacacgtccaccagaacaccgtgaatactgatcatcggagcaagcttcacattgagccagcggatcacttccgccatcagatcggaagtcgtcttctcagacaccatgcagggaaccccgtaatggttgcaaagctccagcacatcctcctccggcttcattccccggctgaagagaagacagggaatctggctggaaatcagggcgtcatacacctcatgtcttcgctccggcgtcaatttatcgagataggcctgctccacatatccgataatctgcacgcggtccttgtcaaaatgatcaaaaaatccggtcagctgcagtgccggacgatttacatccggatgcaccagcacaatggcgtcggtatccagctccatggtcatattccgaagccccagcttttctatcagttccgttatcgtaactccatacatggtccttcttctccttctctgcggtgttaattataatataacggttcagtgtcttcattcactgccgtatcgtgtacagtaactgtctttatcctatcataactttaactggttgtcatctcttccccatgaaagaagcggtagacggcctcggccgcattccggttcatctgaggcgctccggcgagttcctcgatcccggcatccctgacagcctctatcgtcttaaagtgacgcatcagagcttttcttctggccggcccgattcccttaatatcatccaggacagaacgcacctgctctttgctgcgcaggctcctgtgatattctatggcaaaacggtgcgcctcatcctgcactcttgtaatcagacggaatccttccgaatggtgatcaatgggaatctccacattattataataaagaccgcgcgttctgtggttgtcatcttttaccataccgcagacgggaatctcaatctgaaggctcttaagcacctccagggcaatgttaacctgtcccctgccgccatccatcatgatcagatccggaaatcttgtaaagcttccgaatgccgcatcggttccttccgccttcagctgctccgcctccgtaagtccatgggagaaacggcgggtcagcacttcccgcatggatgcataatcattagggcccttaacagtttttatgcggaacttcctgtaatcattcctctttggcctgccgtcctcataaacaatcatggaaccgactgattcgaagccgctgatattggagatatcataggcctcgattctttttacgcccttaagaccgatccattctcccacctgattcatagcgccaatcgtgcgaagctcttcccttttaatcttttccttgtcctgggaaagcaccatccgggcattcttctcggccagctctacaagctgctccttacttcccttcttgggaacaactatttttaccttctgtccccttctggctgtcaggaagctgacgataacctcagcatcttcaagttcctcctgcacccagatctcatgggggataaacggcgtcccggcataaaactgctttacaaagctgttcagtatctgtccgtcctcctcggcggaggatatggacatatggaaatgttccctgcctatcagacgtccatccctgacaaagaacacctgtacaacggcatccccgtcatccttggccatggcgataatatccctgtcgtctatgctctggctggttatcttctgtttctgggccaccttgcggacactaccaagaagctccctgtattcaatcgctttttcaaattccatctcttcggaagccgccgtcatcctgtcttcgaggtatttcatgacaggctcatatctgccgcccagaaaatccagggcctgcttcacggactgctgatattcctcctttgatacatagccctgacagggagcgtcacactggtggatatggtaatagaggcacggcctgtctttgccgatatcctgcggaagctttctcgtgcaggttctgatatggtatatcttgtgtatcagctctattgtgtccttcaccgccccggcactggtaaatggtccgaaatatttattcttatcctttttcatcatacgcgagaacagaattctgggatattcctccgacacggttactttgatatacggatatgtcttatcatccttcagcattgtattgtaacgcggccggtgttctttaatcagattacactccaggacaagggcctccagctccgaatccgtcacgatatattcgaatctggcaatccttgacaccatctgttctatctttgcggtcttgttgcggctgctctgaaaatactggcggacccggtttttcaggctgattgccttgcccacatagatgatttcatccttagcatcatgcatgatataaactcccggctgagccggaagtttcttcagttcttcttcaatattaaacatatctttatctccggcgcagtctggacgcatcatatctttgctgcatcctcaggcattgttttatatcttcaagctgttcttctatcgtcccctccgacggtttcacatccagacagaggcagaggctgtccacctcgcgctgtccggcttttcccttcattctctgcagtattgccattctctcctcaaaggattccgtatccagaaattccagcaggagcgggctgactgcggcctctgcgggcggttcatcctcttcctcagaatcaagcagtataatgtcaaactcatcatcttcccccaggactatggcctctgctttttctccggctggcaccggttccctggccgtctgtccggggtttaccggctcaaatctgtatttttgcccggcatcgggatatttttcatgatccacctcttccatgaacatggaaagcgggcggacccagacgctgaaactgccgtaaagcgcctggtataccaccattttttctcctgtctcagagtgggttgccactgctatgatctgatacattctatttttaaagtgtctgtaaaattctcctggtttcggaactgcattcattgttcaagtcctccgtaatgatagttgtttgatgcattccacagtatccattcttcgtaacccgcatcatataccgcctggatctgctcacgaatctcgtcatttccatatttaatatgatgcttcagataagtggccgtgaaatcctggagccagggacggaccaccgcctggcgctcctcctccggataagcggaaagctcctcttccgatttctgcaatgccccgagtattgtctcatagggatgcaaatccgggtgatcaagcccgaaatttccgtcgccgtaatgggaaggataaatcataggacaaatatagtccaggctctgcgccatctctccataaatctgccctaccgccccggcatcttcctcgctcccgataatcgcgccgaacacgtcggccgaaacgaacacgccgagaggggtgaggctgtcataggcatattgagtgaattctgcaataatatctgtttttgaccggccttttgtctcctcctcgtcaaataccacctgccgcattgtcgaatcggtggcaaaacggatatagtcgaactgtatctcgtcgaatccggcctcagccgcctgtgtgccggcttccaccaggtaatcccatacttcctgtctgtatgggtttacccaggcaagcccttttttatcccggtaaatagaaccgtctgcctttttcaggctccattccggcttcttttccgccagatacggatctttaaaagccacaatgcgggcgattgcataaatatcatgttcttttaatttatccgtcagcgccttcatatcagggatataggctttgcaggctcctatttcattgaaaagttccgagtctatgggagcggtgatccggccgtcgtcatttttgaagtctatgaccactgcattaagctctgttgcatcaatctcttttatgatattatccatcatcgtttcatttccggctacataagcggaaacgtagatgccttttacttttacaggttcccgccggttcgtccggtcgtcgtccgtgatctgaaggaccggctcctccgcctcatccgaatccgatgtgccggcgccgtcatccgctccggtgccgtccgttgtatccgcgctgcccggctcggatggtgaggcattctccagggcgctgtccgttatatcgatcggattatatctggtgcatccggttaaaaggcatgcacaaatggttaataccagccacttcttcatcacatggttcccctatatttcttttctaattcaagaaggctctgtttaatcggcagtccgccgccatatccggtcagacgtccgtccgccccgattacccggtggcatggaacaattatggcgattggattatggtggttcgccattcccacggcgcgccctgctctcggattgccgattcttgccgctatctctccgtaggtcacagtttcaccatatgggatcgtgagaagctgctcccatacttttttctgaaaggaagtaccgcgcatggaaagcggaatattaaactctctgcgttttccggcaaaatattcttccagctgccgctttgcctctgccagcaacggtgtttcctgctctgtcgtttcggcctgacggccggcctggaaggttctggtatctttatctgcgaaggatatttctgttaaagccttgttttcttcaattaggagaagagggcctgctggagtttgaattttgattgaataacgcatttgatcgaccttctttctgtgaaatgtccggtgtagtggggcggggtctttcgacccgggggaatattgccgtggtttggggctgcgggcgaagctaaagtctgcggaacacactcctgctctgtgaaatgcatcgcgctgctaagctcgacaggacctcgctaatcagcgatggatttaggcggcatccgcagactttatccggccgtaccggcagcgtcctcacctgcttgattaaatgacattataccaccccgccccctatcttttccagtcctaactaatttttttgatagttttcagtaacagttcagccatgatgtattccgcgaggtgttttcacatgttttaccggcgtttttcattcttttttaatttttttcattttccccctactcaaatcagagtttttgtaggataataggatgggtttgtattttaaaatattactaatagataaggatgggacgttatgaagttaggttttgacaatgacaaatatctgaagatgcagtcggatcacatccgggaacgtattaatcagttcggagataagctttatctggaatttggcggaaaactctttgatgattttcacgcttccagggttctgcccggctttgcgcccgacagtaaactccgcatgctgctgcagctggccgaccaggccgagattgtgatcgccatcagcgccgctgatattgagaagaacaaaatacgttctgacctcggcattacttatgatgtggatgttctccgccttattcaggcttttacggacaagggcctttatgtgggcagcgttgtaattacccactattcaggccaggccagcgccgacacctttaagactaagctggagcatatggatatccgcgtctaccgccactatacgattgacggttatccgggcaatgttcccctgattgtcagtgacgacggatacggaaaaaatgattttatcgaaacttcaaagccccttgttatcgtgaccgcccccggtcccggaagcggtaagatggctgcctgcctgtctcagctttatcacgagaataaacgcggcgtgaaagccggctatgccaaatttgagacgtttcctatctggaatatcccgctcaaacacccggttaacctggcttacgaggctgccaccgcagatttgaacgacgttaatatgattgaccccttccatttggaagcttatggggtgaccactgtcaactataaccgggatatcgaaattttccctgtattatgcgccattttcgaagggattttcggagaaaacccgtacaaatcccctacggacatgggtgtcaatatggccggcaaatgtatctttgatgacgaagcctgctgcgaagcatccaagcaggaaatcatccgccgctattaccaggcgctgaaccgcgtagccaaagaagagggaagcaaggatgaggtttacaagatagagcttttgatgaagcaggccaaaatttccactgaaatgcgcagaaccgttccggcggccctggctgaagccgcgagagaatgcggccctgccgccgcaatcgaactgcccgacggctcgattgaaaccggtaaaacctccaatctgctgggtgcttccgccgctctgctgctgaatgcggtaaaagctttaggcaatatcccccacggcacgcatctgatatcgcccaccgctatcgaaccaatccagaagctgaaggttgattatctcggaagcaaaaatcctcggctgcacaccgacgaggttctgattgcactttccatgtgtgccgctaccgataaaaatgctcaaatcgccctggagcagcttccaaagctgaaacactgccaggtccacacctccgtcatgttgtctgaggtggatatcaagacatttaaaaagctgggcgtcggcctgacatccgagccggtttacgagcataacagactgtatcattaagattaatccattcaacaagaggccgcagcagcggacggaaatacatccgtcgctgtacggcctctttcttcagcctctaccggcgtttgaccggtagagcgcgattgtaaataataattaaatttcattcctgccgtcatccccggaatcagcttccaatacggacggtccggcttccggtatctcagccaaatcggctaccgtatggacggacggctttgcaggctcttccggcacgtctttctccgcctggacgctctgcacctcctggtcatcctgcgccggtttttcttccggttcaggaagtcccttaaccttgcggaaaatcttcataaattctttgccggtaatcgtctctttttcaatcaggaaatcggcaatcttgtcaagagcatccctgttttccataagaagccgctttgcctcttcataggaatctttcaggataatcataacttcctgatcaatctcggctgccgtgacatcactgcagtttaagacggtacggccgcttaagtactggttctcctttgtctcaagacccatcaatccaaatttcttcgacataccgtactgggttatcatcgccctggcaattctggtagcctgctcaatatcgttggctgcgcctgttgtaaccgtatcaaaaacaatctcttcagccgcacgtcctgccaggtatccgacaagcatggcgcggatttctttctccgtattgagatacttctcctcctccggtacatgcatgacatatccgagggcgcccatcgttctgggcacaatcgtgatcttctgcaccggctccgcatccttctgcagtgcgcttacaagtgcgtggcccacctcgtggtaagatacaatacggcgctcttccttactgagaatcctgtccttcttctccttgccgaccagtaccagttccacagcctcaaacaagtcactctgggcaacggcatgacgtccatgtttgacagccgtaatggcagcctcattcatcatgttagccagatcagcgcccactgcgccggaagtcgccagggcaatctcctcaaaattaaccgattcatctaattttacatctttagaatgtaccttcaggatattgatcctgccctttaaatcaggcttatccactataacccgcctgtcgaaacggcccggacggagaagggccggatccaggatctccggtctgttggtcgccgccataacgagaagaccttttgaagagtcaaaaccatccatctcggaaagaagctggttcagcgtctgctccctctcatcgttgccgcccatacgggaatcacggctcttaccaatcgcatcaacctcatcgatgaatatgatacaaggtgccgactgctgcgcctgcttgaacagatcacgtacacgggaggctcccacgccgacgaacatctccacaaaatccgaaccggataaggagtagaacggaaccttggcttcaccggccacagcttttgcaaggagcgtcttacccgttcccggagggcctacaagaagggctcccttgggaagcttcgctccgattttcgtatatttaccggggttatggaggaaatcaacaatctcagtaagggattcctttgcctcatcctcacctgccacatccttaaatgtaacgcccgtctctttctggacataaaccttggcattgctcttaccgacacccataatcccgttgccgccgcccatacgcctcatcatgaagttcagaagaagaaccatcagtccgattggcagcacccattccaaaatcagtacgataatgctggccgtggcatctacctgggcctgctcatactgtgtaaccccggcagcatccagcttggtctggagatccgggtcatacatcgggatcgtatagtactcgattccgataagtccgccgtatttactctggcttccggtatatttcttggaatccttcttcggagtaatctcaatcttgttgctgctgaccactaccgaatcgacttccccatcctttaacatctggttgaactcgctgtagggcacaagctgcgtcctgctctgctgccacaggttatgcatggcgctgacgcagagcaatgtaaaaatcatagtaatgataagaaccatgtaattctgtccgccctttggattcttaccattcttattctggttgttattgttatccatatgtgttctccattctaaatagatatatgcgtatctattctataccattatagtgtgacattccttataaatcaagaaccgaaatattaaaatgttataaactagttcctgttcacacggttgtgttccgcgaggtgttttcgtgcgcaatttccacgaaaatcccgagttgcacggcgcgacgcgttgaaaaataaactttccgccacaatcaacggcgtttttgccgtttctgtgcatcgcgaagcgtgttattgttcacagcgcgccgcttttgggcggggtgtgaacagtaacagaaactaaaacatggatttttatatgaaaatcacacattttccgctttatccctccatcccgctgtgttagaataaagtaatctataaaattcaagacggcaggagaccggctgatgccggcttcctgctgcagatgaggtatattatgctcaatcatgtagtccatggaattgaccccgtatatgatcaaaattctgaaattctgatactgggctcctttccctccgtaaaatcccgggaggcctgctttttctacggccatcccagaaaccgcttctggccggtcctggctgcgcttcgaaaagagccgcttcccgcgtcaacaaaagaaaaaagaaattttctgctgcgcaaccatatcgccgtctgggatgtcatcgaaagctgtgacattgaaggttccagcgacagttccatcagaaatgccgttcccaataatttgaacctgattcttaagactgcctctatcaggcagatatatacaaacggaggcgtatcggcaaagctatatgacaaatactgtcttccctttacaaaaataccggccgtaaagctgccgtcaaccagcccggccaatgccgccgcatcactggagaagctgaccggcgcctggagctgtattaatgtgaatcttccgccctgctgaacgataaccggcccgctccgcacaggccactgctttcaatgacagcaaccgttcagacagcaaaaaacgttacggctgaacctgtttttatgcctctattttcctgacatagttttacccgcttttaccacaataatactgaggtgagacatatggaaaataattataaggcagacggcaagtcagacattaccgcagacaaaaccccggagtttgatgaaagtgaaaccatgttcgatctggatatctgttccgccacagactgtaccggcctgattccggcccttccgcagtccgacggcgaaatcacttcctacgagcagctctaccactttcttccccgggcaaaaaatgaaagcgagaaagactgatcagaagacaagctgcaccagaaccatgtagagaacggttccggctccaatactcaaaagtgaatttttcttccacgcatgaagcgctgcaacggcagccgatgcaataaattcagggagtccgaagggccagttcaggatttctattcctttcaggcagtaaaccacaagaagccccatcgtggcatagggaagcgtacggcccaggtactccacgtatctgggcatctctttgccctgtggaaacaggaaaaatgggagaaatctcgtaatggccgtccctgccgccattgcaatgacaatccatagtatatgcatgtctgtcatttttctttcctcccctcttttttatagcctgcactcacaacgcccaggattgcaatcatcgcaggtatgataaaggcatcctgaccaaaaatattcaggcacagaacagaacaaaccacgccggccacagccggcccatgcttcttctgtgacatccactgttccgtaaaaatcacaataaaaagagccgtcagtgcaaaatccagccctccgtattaaatgtaatgacggaaccggctgccgccccgataagggttcccaatacccaataacactggtcgagaaatgtcagcagtaagtaggttttttcttccggcatcccttcaggcaccttctcattgcacacaacggaaaaagtttcatcggtcagcccgaagatcagatacggcttggattttcccatattctgatatttccccagcatggaaattccgtaaaaaagatggcgtgcatttaccatcagcgccattaaaaatgctgctgcagggcttaccgctgccagaagaaggttaatacccacatactggaggctgccggcatatacaatcacgctgatagccaatgcccatccggcgctgaagccattcacactcatcaatattccgtatgccgtaccgagaaatatgtacccaaccataaccggcactgttttcggaaatacatatctaagtacttctcctgtgccgcatttacctgctgccttgctctccccaatcatcttttcaccctcaaccgacttttcatattcattctgtattccgattcattcatcttgcaatttatcatcttcccctgctatactatgcagtagtaaataactggaaaaaccttacattatagcatttaattgtatctgtgatccatcactatgtcaataggagcaatggaaatgaaaccgcaatttaattctctattcagctaccgtgcctgcaatttctgtcccagaaactgcggggcagaccgaacgaagcagaccggttactgcaaaagcccggcccatatcacagccgccagagctgcccttcatcattgggaagagccatgtatcagcggtatccgcggaagcggcaccgtctttttcagcggatgcacgctgagatgctgcttctgccaaaactataaaataagctgtgaaggatacggcaaagaaatttctcccggacgcctctgcgagatatttcttgacctgcaggaacagggcgcgcataacatcaatcttgtaacagccacacaatatcttccctccgttctcgaagcgctggaaaacgcaaaaaagaatctgcacatccccgtagtctacaactgcggcggttatgagacggcagaaacaatcggcgccctctcggagtatgttgatatctggcttccggatctaaagtattattctcccatactttcaagacggtattctcaggcagaagactactttgcagtcgcctcccgcgctgtggaacagatgatacgccttacaggcccgcctgaatttggggaatataaagacaagcggtccggaaccgcctgcagcatactgagaaaaggagtgattataaggcatatggtactgcccggacataaagacgattcaatccggctgctgtactggatgaaggacacgcttccaaagggcggctttctcatcagtctgatgagccagtacactcccttctaccgcagcgccgattatccggagattaaccgcaggatcactacatacgaatatgaaaaagtgctgaatacagctatagaattgggactgacggacggattcatgcaggaaaaaagcagtgcaaaagaagaatatacgcccccatttgaactcgagggactttaaagagagagacgggatttatttctcaccacacaggtaaatcaacacatagaagtgggtaccgataaattacttttttatcgatacccacttcaagatacttcgtccattggtttttacctctcttatgtctacctgtgacatctatatgaaatttttaccaacaacctttttctttctctatcaaactatttcttttacatatcttatctattctcttctcggaatattgttcttcttaataatactttctcgtcatattactaaaccgactctttttcttcgacatttatatagattttattgtttgactttttatttctttttaaaggttgttgtttttcctatgtctgatttaaaaagttaaatcagacgagttttactgttttggtggaccgtacctcctttacttagatttggtttggttctttaatttcttttgcttttgtatctttttgatgtctttattatatccattccaaaccattttgtcaatactttttagtgtttttaagctatcattttatatttataatcttttcaccgttatatactgatatttatagtttatttattctgaattttcacaattattcaagttattgctatgaattagcaggggaaaatcaaaaacgccgctgattgtggtgaaccaatgtcatgatgttggggtcaaaaggtcttttgacccctttgataccggattgctccgcactgcgtgctctcacaatcctcaaaaacattcgcaatccgctcatttttctgcgaaaaatggcttcttactcatgtttttggcgggtcccaagattaaaaatcttcatgcaagcaagcttgcatcagatttccaaccttttgaccctggtatcatgtcatttagttaacagtgcaataaattggagatttaactgaggcccggaggacgcgtccggaacggaccatgtccggtgtggtgggggagtttgtctgagtcttcctaccccggttgaaggttgtcgtgagggggaatccggccggaatgaattgctgcggggaccgtttgcactctttggagtgcgcatcagtgctaagctcgtgaggaacctcgctaagcaccggcggactcccatgtcccctacgcaattgattccgcctacttccccggtccaggtttccgccggggacggaagactcaggcggaggttttcgtggcaccggacatggtccgttccgggcgctgattatctccaaccttaaatggggagagccttgtcgcggccactacgtgtttccggcaggccgatatcaaatctagcgccttttataaaggcgcattgaagacttatcgcctttcccgcacacggaagcactgagtggccgcgacaaggtccgcccccgcacttaacgcgtgagacactcagcggccgcaggccagcggacggggccgataccccggcggagtctttcgtcccggcgaaaacctgaccttgaggcggaggggaagataaagtctgcggatgccgttgaaatccatcgctgattagcgaggtcccttacgagcttagcagcgcgatgcatttcacagagcgggagtgtgctccgcagactttatcttcgcccgcagtcccacaccacgacaatcttcccccgggacgaaagactcatatacaccccacccgtccgctggccgtaccggcggcgtcctcacctgctcaattaaattttaaaatcgtcttgtaaatttcctctgcttccgctataataaaaaaacactacatctgacattcaaccgacaactgccggcttgttttctgaatatctgccgatagttctttctgcggagtaaaggctgttttatttactcagaattgcatcaatttcttttccgtccagtacccgttttttaattttcatttgtcattgtaccctgagtctttttatttctgtttattcttttatctgttacactgtctgtctctatctatattttaatccaaagctttctttgaatcctatctgtcccgctctgctgcacttatggcagcctttcttctttcatttctcatgcatctgctctcatagcagttgacataatattccattcaggaggtattttatgatttatgaaacttttttaactaccattcactcacttgttcaggaaaaactggagggccgggctgaagtatcccttcggcgtgtcctgaaaaataacgggcttctcctggacggcctgtctatctcttcatcggtttccgcattctcgccgactgtgtatctgaattcctattatgacgaagaagaaggcggactacctctccccatcattgccgagcagattcttctgctctatgaggagggcgatggactgccctcggagctggcagaacaactgaaggattttgaaaaggtgaaagaccggattgcctacaaactgatcaatgcggaggataacgccgttcttttatcgggagtgccccacttccgttatctggatctggctgttgtcttctacatcatcgtggcggaaagtgaggaagggcagatgactgccctgattcatgacgaacatctgaacctgtggaatatcactgcagatgatttatcgctgctgtcggagcagaataccggcacccttcttccctgccggattaaaccaatcgaggacgccattatggaactgggagagggagatgaaggtacgctcacggacgcctcctccctctttcctgtcaatctctatgtcctgaccaacgaaaagggcatcaacggcgcctcctgccttctgtacaaggatgtattaaaaaacttcgcggcacaggtagacgatgatcttgtcatccttccctccagtatccacgaagttttgctggcgccttataaaaaggcgctgtctctcgatgagttaaatgaaatgattttctgcatcaatcgttccgaagtacctgtggaagaccgtctctcggatcacatctacttctattccagggaacagaactgtctctatctcccgccgaatctcgaatctaagtcttctgtaccaggcggaacaatgaatccacaataaatatggcaagcgccatcgctccggctatctgtatggtctgtaccaggtggtaggtggaaagatccgccagcccctgtatcataaaatagacacagcggtaaacggaggctcccggcacagtgggcaggatccctgctaccagaaataccgtaaccggagcttttaagacccttgcaaaaatatggctcaggattgataccaccagactggaaagaaaggccgccataatcagggagcgtcccgcctgaagcgccagcaggtagacaaaccagcatacccctccggccgctcccgcatagagcagaaatttcttcggtacgtccagaataatggagaatccgaaaatagccagaaaggcagccgcactctgtactgcaagttctgtcataagccacctcccatcattccgaatacgaccattgcggcgccgacaccggaggccacacccagagccaccacaatcgcctcggcgattctggccacaccggagctgtaatccccgttcaatgtgtcgcggatggccgcagtaaaggttacgcccggtaccatgggcatgatggcgctgatgatcacggcatcaatattcatactgaagaataccagccgctgtatcagcagcgccgtcaccgccagggcaaaggagccggctgcattctggcagaagtcattgaacctgaggcgcgaggctcctgtaaccgccagggccaggacgagcccaacaacccctgccgccacacagtccagccagtttccgccgaataatacggcaaagaaagccgatgtcatgatataaccgatacatttatggagaaaaccatactctatattcgtccggatttcttttaattcctcctgcgcctcttccaccgtcatctcacctgcacagaaccgcctggatatattgttcacccggtacacccggtttaaattagtcgatcgtttattcactctcttgacaactgtaattgcgctgatcgaaggatcggaaagcgtcgcaaatattcccgttgcaagtgcgaaaacttctattccctccaggccggactgcttcagtatccggctgaccgtatcctcaatacggtatacctcggccccgctgaccagcataatttcccccgccagcacggccatctctatcagtgcctgataatccattctctgctaccccatctatcgtatttaccggaaaaccgtcaggccccggagcggttgttaaaaatccctgcttctcaccgctgcttattaaaatattctgctgccaatctgaaatacgataactgctgccgtccaggcaaccgccagctgaaaagccatcatcagaagcgtccagcgcgtagactgtgtctctcttctgattgtcgcaatcgtggcaatacacggtgtgtataaaaggcagaagatcatcagtgcataagcattaactccccaaaccctgcgcctcctaatattgcggaaagctgtgtcatgccggaagccgaattaatattactaatcccgtaaagcacggaaaaactggagaccaccacttctttggccgaaatgccggaaatcagtgcaactgcgatctgccagcttccgagtccggccggcgccagtatcggcgtcagactatgaccgataatcgccgcaaagctttctgaaacatcattaataagacctgacggcccgatattcagaataaaccagaggatgattgaagcaataaaaatcgtcgtccctgcctttgtcagataatccttgaccttatcccatacatagatagcgacagtcctcagattcggcgtcttatattccggcagctcaatcagaagaatattatcgtatttttcatttgaagatctatgtacaatatatgccaccagaatcgcgacggccagacctatcacataaagtgaataggctaccagaagcgccttctggggaaaaaacatctctgaaaacaggacatagatcggcagtctggccgaacaggacataaacggagtgatgagtatcgtcctccttctgtcctttacgctctccagcgcccttgttgccatgacggcaggaaccgtgcagccaaaccccagcagcatcggaaggaatgcttttcccgataggcccaccatccccattgtctcattcatcacataggcaacgcgggacatataaccgctgtcctccagaaacgcaagtgccataaacaggatgaagatattcggcagaaatgtcagtattccgccgacgcctgcaatgacaccgtccacaacaagggagatcacccagtcagacgcatgcagcccctgaagtacggtaagcgctgaggcggaaaaccagttcaggccgctctcgaaatatcccttcaaaaaatctcccactgtaaacgtaaagaaaaatacgagggccataatacccagaaaaacaggaattccccagacaggatgcgtcataatctgatccaccttgtcggtaaaggctgatttctccgccttattaaacaggcactcttctattattgcctcgatataatcatatttttcattaatgatattcttctcataattcttgtctatgatgtcatgcagatccaccggatgatctttacagacctcctcgtcgtattccatcatcttaatcgcatgccagcgcatattgtccaattggccgaaatgcgcttttaagacgacctcaatcttggcaatcctgtcctcaattgaatcagaatagcggaccacgactccctggggctcctcctcataatgatgcactaccgcatgcatcagtacatccagccccgttcttttcctggccgaaaccggtacgaccggaatatgcccgagcatctccggaagtcggtgcagatcaatctccatgccccggtcttcgactatatccatcatattgagagccaggatgaccggcttcttaagctccagcaattgaagcgttaaatacaggttcctctcgagggaagatgcatccaccacattgattattacatcaacctcgttatcctctatacattttctggtgacccgttcctctatggtataggacgtcagactgtatattcccggcagatcaatgactttgatggggcgtcctttatagctggtctcgccttccacccgctcaaccgtaacgccgggccagttggccaccttcagtttagctcctgtaaacgcgttaaacagcgtagtttttccacagtttggatttccaacaaatccaaccgtgatctgtccgttatctgccttcatgaccagcgcctccccgattgtatttctgctgggtatgctcttgccaggatgactccctgatctcaattccatcggctattttctggcccagcgccagcctcgtccctctgacgttgataatcagggttccgcttttcttcttattcagaacggttacttttgtatgctcattgactcccagagcctccagacgcctggtcagacgctcctcaatcataacttcctggacaatgtaacttttccctatttcaccttcataaagcttcatggttagtcacctcttccctatcgctttatcaattgtaaccgtcctgtgattccttgtcaattatcttccagctccagaagcatttttttaatttccgtcatccggtcacgcagcgccgccgcttcctcaaagttcagctctgctgccgccttatgcatctttttcatcagttctttaaccagcttctccagttccttcttatccatcgattccggatccttggtcacttcgttggtaatgccttccgcggcctgggaaatcgtaatcagatcgcgtaccgccttcttaatcgtagtcggcgtgattccatgttcctcattataggcctgctggatcttccgtcttctctcggtctcaacgatcgcggcgcgcatggaatcagttatgttatccgcatacataataacgtggccttctgagtttctggccgcacggcccaccgtctggataagtgacgtctccgaacgcaggaagccttctttatccgcatcgagaatcgccaccagggaaatctccggaatatccagcccctctctcagcaggttgattcccaccagaacgtcaaaaacattgagacgcatatcccttataatctccgctctctccagagtatcaatatccgaatggagatatttgacgcggatccccacctcgcgcatataatccgtcagatcctccgccattctcttggtcagcgtggttatcaggactttaaatcctttttccacctccctgttgacctcggatacaagatcgtcaatctgtccttccaccggacgtacttcgattggcggatccaaaagtcccgtcggacgtataatctgctccgtcctgagcatctcatgctcctcctcatatttggatggtgtggcggaaacaaacataatctgatctatcttgctctcaaactccgagaaattgagaggacggttgtcaagagccgacggaaggcggaacccaaagttgacaagcgtctgctttctggaacggtctcccgcatacatgccccggacctgtggcagggttatatgagactcatcgacaataatcaggaactcctccggaaaatagtcaatcagcgtacagggcggctccccgggcagggaaccggtcagatggcgggaatagttttcaattccggaacagaatcccgtctcccgcatcatctccacatcaaaattagttctctctgagatacgctgggcctccaaaagcttatcctcgctcttgaattcagccacgcgcaccttcagctcctcaaggatattcgtggccgcctgctccatcttctccctcgggataacataatgggaagcaggaaaaatcgcgatatgtcccaactgggacttgacctccccggtcagcgtatcgatctctgcgatccgatccacctcatccccgaaaaactcaacccggtaggcgtctccggccgaatacgccggataaatctccagcacatcaccacggacacggaagctgccgcgtttgaagtccatgtcatttcgcgtatactgaatgtcaatcagcttatgaataatctcgtcccgatcctttatcatacccggacggagtgaaattaccatctccttataatctatgggactgcccaggccataaatacatgaaaccgacgccacgatgataacatcctgacgttcagacagggcagccgtcgccgaatggcgcagcttgtctatctcatcattgatggaggagtccttctcgatataagtatcggtagacgggacgtaggcctccggctggtagtaatcgtaataggacacaaaatactccaccgcgttctccgggaagaactccttgaactccgaataaagctgggcggcgagagttttgttatgggcaatgatgagggtcggcttctgcagctgctgaatcacattggccatggtgaaggtcttgccggaaccagtaactcccagtaacgtttcgcattgattgccttctttaaaacctttgaccagggcttcgattgcctgcggctggtcgccggtgggcttaaattctgagtgtaatttaaactccatagtgtgtttttacctccttgatgacccgataaaaagtacgaatattcttgaactcctttaattctgaatagaactgcacttcaataatttttaatacaaggattatagcacaggcgatataaaaagtataggcacaaaagaacatttgttccttttgtacccattctatgttactgcttgcagaacgccgcttttcagcgggggtgtaaatgatgtgaacagtaacatattactagtattttaacactctcagcgtcaccttcatcccccggttttcctcgctctccacttcgattccgcaagtctccccatagcacagcttaattctctgattgacattccacatgccgaagccgcgttcatcgcatctggccgtctgctctgaattaattctcttctgcagtttagcgagactctccggatccattccattgcccgtatcctccactgtgaaaatcagaaattccccgtcctccctggccgacacttttaaatatccggaactttcctttgatttcacgccgtgatagattgcattctcgacgattggctgcagaatgaatttggttatctcataatccaggatatccggttctgtctccatttcccaaatcagctgatcatcaaagcggaccttctgaatcttcagataatagatgacgtgcatcagctcgtccctcaccgtgaccatatccctgccctggttaaggccaagccggaacagccgcgaaagatccgtcaccagctccgcgaccttcctatccccatttttcctggccagcatgttgacagaatccagtgtattatagagaaaatgggggtttatctggtataccatcgtctgcagctccaggcggcggctctgtgcctcttctttcttcactcgttcaaacagttcggagatctgatccgccatctggttcagcagtcggcccaggctgctaatctcatctcttcccgtcggttcgacttttgccgaaaaatcgccttttccgtaacgctccatagattctttcatactcttaatcggctttgtgagcctcgccgccagccagatgctgatggcagcggccgccagaagggcggtcagaagaacctttaccattttactgaacaattctttggcaggaccaaggatcagatgtttatcactccaggtgcgcagataccagtccccgattgtgatctctgtatgcagcagttccgcataattgtcatagtaattatagaaaaatccctgctctgtcacctcgaacccatttcggagtcccttaagtgaaaagcgctggctgttctgcagtctgaacttactgaacatatctaatatatggctattatttatctgcagaaacagatatgcagcttttccttcttccccggccggctcaagcttctcaaatgccatcatgctggccgtgtcataaccactgtcccacacgacatttccctcatggcgttcagccgtgctgatacggtcaaccagataagttctcactttccgggaatctccggttcccacaacttcataggcttggttaatgacatacatattatgaataaagtcatgattctttatgtactctttcatccacgcttccagcccgccccgcggttccccctcttcccagagaagcggcatctgagataaaaacgcttcgttctccgccagcttttccatctcattttcacaattctggcgaaaaaaactgatggatgagcatagggactgtgccagccgttcctggttctgttgctgcatctccaccagataatcgcaaagcacctgatatccggtcaccccaaagagcaggaacaggatggtaatggcgcctccaaaacagactgttatctttgccctgaccgtcttaaacatccctttttcccacccgctttcgatactgccccggcgtctcccccgtatgcttcttaaactgcatgctgaaataatacacattggaataaccgacagcctgtgcaatggcctgatgcttgatattcgtatgctccaggagctgtttcgcgcgttcgatccgttttcctgttatatattcaatacaagtcaggcccatctgcctcttaaagagcctggaaaaatatcccggactgacatgaagcgcttccgagatatcgtttactccgaactcttcctgtcctatattctcatcaatcatctgtaccgagcgcgcaatcagtctgccggcttcctgtccgccctctgctcctgcttccagaaccattcccgcatcccgcaaagaagaaggcagctccatccagtcgtccaccatccttccgacggcgattcttaccttctggtgcagctcttcctccagaaaccgggaaaattccatcagagcggccccggacggctgaaatctcagaagcacggcggcctgtccttctgacagccggacgcactccacacagccgccaaacgccgacgaggcagcatgaaacaccgccattcgaaaggcttcgccggaaagtctgtcttgaccggagttcctgtcttgaccgccatccagccggatggccatgcaactcatcggaccgccgccgggctgaatctccgccaggttcattcggctgccaaaatcctccctatcggatatctcccccctcaggacggcgcgccagaaatctcttgcaagctgaggacggtagactttcacgattttctccgtctcaagtacctgatcctgcacgatacggtcagaacgcacacgtttcatggcttccagaaccgcctgctccatctcctccgggacaaccggtttcagcagatatttaaagacaccggcttcgatggcctctctggcatatccgaagtcctcataagccgacagtagcattacctttacggagggccatgattcccggatctgctttgccagctcaatccccgacattttagacatataaatatcggtgataaccaaatcaaagggctcttccctcaggagacggagcgctttatccgcactttccgccatggccggcttatcacagcccagcttttcccaatcaatgagttccgccattccttcccggataatcttctcatcatccacaaataatattttcatccgcctgccggcctcctttgcaccccatatcacagctattgcagatattttacctctgttcttttagtataacgaagttatccgattggttccagtaccattttttccctgttctttcagtttttttccttttgcagcattttatccgcatatacggctaataccagaatggtaccctttatcaggtattgataaaaggaaggcatatttaccatatccagcccgttattcatcactgcaaggaagctgacccccaggagtgttcccgcaacgcctccgctaccacctctcatcccggtgcctcccagagccaccgccgtgataaaatccaactcgtatcccttggccgccaccgtggaggcactggacagccggccgaccaggatcaggccgcttaaaccggccagaacaccgcacagcgtgtagcagagtatgatgacccgcatcggcttgattccggccagccttgcaatttcctgatttcctcctaccgcgtagactgcccgccccgtccgggtgtatttaagaaatgcatagagcagaaggaacacggccaggaacaacagaagctggaccggcacgggcccgatatgcccctgtcccagcatggaatagccgtcgtccataaacgtgatcggcgatccggagactccctgtaccacggaatcagccgtcacatagacaaggcttctcgcgatggacatcatagccagcgtggctacaaaaggagcaatcttcagctttgcgatgcagagtccgttcataaggccaatgaagccacaggctgtcagagcagcggccaccgtaagggcaaacggcagttttaccggattggccgcgctgatcgcatttcccagaaggcccgctccaaccacgcccgacagcgccatgaccgaacctgcggagaggtcggtcccgccggtcagaatgaccagcgtcatccccatggatgcaattccatacatggacagcgtccttaatatattatcgatgctccggggtgaagcaaactccgggcgaatagcggtgaaaccaaaaaacatgactatcaggagaacaaatatcagtttctgctgattaaaatgcttcttcctgcttccctctcgttccatcattgtcatacacctcctattttcctggaagtctctctgttcgggaacagataacgaccgccgactgccagaataattaccagtcccttgataaacagcttgtaataggtaggcagccccagaatattcagaccattttcgatcacgccgaaaatgaaaatgccgattaccgtccctgcgaccgagccttttccgccggattgcagtgtaccgccaagcacgacgccggcgatgacgtccatctcataggactcacccgccacggccgacgcactggcaaccctggatgtcatgatgattccggccagccccgccatcactcccatcagcacataggtcagacagacattccgctcggtccggatcccggagagcctggccgtctccctgtttcctccgatcgcaaacagggaacgcccgaacgaagtgtatctcagaagccagccgcctgccagagctacgaggataaacaggacggcaggagccggcacaattcccagatatcctttcccaaaccaggcgaaatcggccggaatcggcttaaagttgataggataaccgcctgtatacaaatacgtgattccccgcgcaaagatcatcatggcaagagtggcgataaacggctccaccttcagtttggtaacgatcaggccgttggccaggccgatcagcgcggcaacggacaagccgatcaggatagccgcataagtattgcatttaaacagattactcgtaatatagtcgctgtaccctcctatcgtcagtgacgcagtcaccgccccgccacggcaaaggtggagccaaccgacagatcgatgccgcctgtcaggagcaccagagtcatggcaattgacatgattcccttgattgaattcacccggataatatccatcatattccctttcgacaagaaattaggcgcaatcagactcatgatcaccatcagggctgccagtgcaaacagaatgacgagatgcggccttacggccaggcagattctgtctttcagggaaattctcactgtttttttcttttctttcattccttccattctctttcccccctcgctaaacggcctgcccggcggcataagccatgatcgtctcttctgagaaggatcccgggaaagctccccgctgatccgtccctcatgcatgaccacgatccgatcgcagacccctatcagttccggcatctcagaggatatcatgagaatccccatccctctctccaccagttccttcatcagttcatatatctccaccttcgctcccacgtcgattcccctggtcggctcgtctatcatcagaagactgcagtcggcgcacagccatttgccgagtactaccttctgctggttacctcccgacagattcgctaccgtctcatagatgcccggagccgctatgtgcagcttttctttatattcttccgtgatctcctcctcctgccttaagttcagcctgccccattttgtcatttttttaaggctggcaagagtagtattttccttaatattcatcatcaggacaagcccctgcttctttctgtcctccggaaccagactgatcttccgtgcaatcgcatctcccggacagcggatatccgcctgacggccgtcgattttaatcgttcccgaagtgcgcggatcggctccgaacacggcccggacaaattctgtacgccccgctccaaccagaccggcaattcctagaatttctccccgatgtaccttaaggctgatatcctgcagtctgtccttcgttgaaagatgttccacctccaataccggttctccgatatcagctttggatttggggtacatgtcctttaattcccgtccgaccatcagccggatcatgtccttaatttctacatcctttaccaaagccttgcctacataacagccgtcccgcagtactgtgatacagtcgcagatttctttgatctcagccagtcggtgcgatacatagattacggctacctgctgtcgcttgagctccctgattacggcaaacagattgtcgatctccttctgagtcagcggagccgtgggctcatccatcacgataatacgcgcctccctggagagggccttcgcaatctccaccatctgctgctgcgccactgacagggaagagaccggaatgcccggatcgatgtcgagtccgactctcttcaaaagaaacatactgtcttcacggcattttttccagttaatcaccccgccctttttcgtgggctgacgccccaggaatatattctcagccacactcagatgggggaggctgctgaattcctgatagatgatggagatgcccagttgttctgccagccttggggtcatggactccaccttttttccgtctatgtagatgtctccttcatccttcacgtaagctcccgacaggattttcaacagtgtggatttaccggcaccgttttctcctaaaagagcgtggatttctcctcttttcacctctaaattcacctgcgaaagcgccttcacgcccggaaatgatttactgatattcatcatccgcagataactgttgtcttccattcgctattccctccttaagccaaattttgataccacggcctccagctccttcatcttttccttcgacggcggcacgatatctcccaattggtattctcttcctatattccggtatttccctcttcccagccggtgatagggaaggagctcgtaccgttccactcccggcagatgtttctttatccagtctgccatcgccgcaatatctccggaggtatcattgattccagggatgacgggcgtacggaccgccagttcaaggcgatgggtccgggcatacgctgcagcccgcctgatattatccagaataatctgattgctgacccctgtatatttgacatgcttttcctccggcagcagcttcatatccatgaacagaacatccaaatagggaaggcatgcctgaatcttgtcccactctgcgaacatgctgctctccatcaccgtatggagtccccgttctttcgccgccgtcagaagctccagcagaaattcaggctgagccagaggttccccgcccgtcatggtgacgcctccccgctgcttctgtagatcccctcgtctctcatcacttcctccagaaccatgtctgccgtcataacctctcccataaccgtgagcgcctgtgcataacatgccttcgtacagcaaaaagcgttctcctgctctgctcctctgctgcaccgtcctcggcatatctcataatccagcctgatccatggatccgacgtatgtatggcgccgtgagggcagtgctccacacagcttaagcagtgaatacatttatcgccgaataaagccggttcccggcagaactcctgtgattcagggttgctgcaccactgacaggacaggggacatcctttaaaaaacacattggtccggatacccggcccatcatgaaggctccatctctgtatatcaaaaatgactccctttttcttttcatctgtcatacttttcctcccaaagccgcctccctcatcaggcgcggactaatgtaatacggcgtccctttagccggaacttaagggacgccgcgtcagaacatgtttataatttattcgatcattacagccgttcttccgtccgctcgatgatatcctgctgcactttcttttccaggtttacaaagtaagcggagtatccggccaccctcacaatcagattctggtatttggctgggtcctgctgcgcccttagaagcgtctcgcggctgactacattgaactgcatctgcattcctcccagtgaaaaataataatcacttaaatttaccagccggttcagcccgcgtcttctgacaaatcctggggaagcagttttagattataaagcgaaccctccgataaaatcaggttattgcatctggatacggatcgcactgcggcggtcggccccttcgtatcggtacctctcatcggcgactgtccgtctgacaaggacatcccgcccggtcttccgtccggcagcgcgccagtcaggagcccgaaaggcgtgttggatgaaacagtggtcgtagacgcctggaatattcctccgatgggtccccttccgtacctggtattcttgtatttcggaagttcctcacacacagactcaagcacgcggctgacgattttgtccacctcctccacatcatttccatatttgggaacgtgaaggcacatctgctgaatctgcggtcctgtcgggttcgtcgtcaaatcttcgaaattagtcagcagagcatgctttaactgttttccggtaatcatcttatcgtcgaacacaagcttcttaatagcgtaaaggctgttgcccgtattggcggtgccgattgtctcattaccggtaaaatcatatttggctccgccctcttgatcgatttgccccgctctaaaacagtgagggtgcatcccatcacagaggtaagcggttcctccatatattcttcccacaaccggtccgtcgtgttatccatcaccgcatggatcccggcataataacgcatctggtcctgaaacgcatcccagacctcttcgaaactctcgaagctctccagatcctttccattctgattctcatgcagtgtcacaccgctcgccggatccttcccgttatacaggctgacttccagaatcttggcaagacagaaccatgcggcgccggtccgcccccgcgaaggcctgccacgcccggctcggcacagccgacaatgcagtaatccgacgcgtcttttctgctgtatccccggttcatcatggccggtatatacaattcatcattcgccacggccggaaacccggtcccgagacgtattgtctctgcaatcttaagcttaaattcctccggtgtcttcttatgccatcttacataatgggacggctgcagagtcctggtgttagcgatgcagtccataatgatgtaagacagctcattggtagcgtcttctccggtctccggatcgatcccgccggtcgtcagattctggaaaatcggttttcctctgaaatacgccgtatcatcccaggaacgcatccgctccacggtggataagagtacaaagaaattctggatcagctccactgcggattctctggtgagtcttccctcctccacgtcctttcggtagtacggaatcatcacctgatcaaatcttcccgggctgatgccctgggcattatcctctatctggatgccaaactggacaaaggtcataaactgcagcgcctcatgaaaggtatccgccggatgctccggcacctttccgcagatccttgacagctccctgagttcctctgcccgtttagcgtccggctcttgttcagccagctccgccgccagatcccggtagcggtgggcgtaatctatcatcgcctggcatacagtcttagccgccagataaaagcggtgcttttcgattccctccacagtccacatttccagttctgccatatgctgatcacaaagcctgataacctccttcagtccatgtgtaaaaagccatggccatggaggcgtcagatgaccgcagccgccatgcatgaaattcacgatattgacggctcccacgtcatcctgcgccgatatcgcttccgccggcagattcgcatagagacggtccttatgggtatttcccttccagaaccggattatctcctccagctccggcatatccgatcggcggtattcgatccggtccgccggtctctcgtccggataataaggcgatccgccgataaattcttcctccaggaagtccaccgcatattcgggaaacagcggggcatagttgggcctgcttgcctggtttcccgctaagaggctgcccggaaggatatagagcgacatatgattcagtatttccttcagggaaaccgccctcagctgtataggcaaaagcgcacggttctcctgatataccttcgttatgatccttccgcgctccatacacatgccgacccgggaggccccacatattcatagagccggtctatccgctcggtccgctccggcttctggcacatctgataatgtaaaggttcttgttcaatcgtatcggtactcataagtttcctccttaccacccctgaaactccggttcgttgcagttcgtactgtcaatcttgtagcaggtggggcgcagccaggtaaaaccgtcatctgtctccgttacttcgatcggcgttcccttatactggatattactgtaatctacactctcacctttcgccaatttatatgccacttctacggctaccgcctgctcatccggtttaaacataacctcgtaattgatttttccagcccggaccgcatccagcgcttccttctcaccgtccacactgatgatctgaaattcgcccatgcgtccggcagcctcgacagcctgcagtcctcccagcgccatctcatcgttcatataataaatcgcctgaaaatcgccttcattcgggtatctctgaagaattgtctccgtcacttccattcctttggtccggtcaaaatcaccgtctaccttatagatgacttcaatgcccggctcttcctccagcttggaataataagcgccgccgcggtcaatggtggatccggctcccgccgttccctctaccacaacgactttacccttcgcattacctgctccgcccagcgcctctatcgtctgctctgcccctgtgttccggaaagcaccatatcccaggtgacataacattcccaggtaacatcctggccctgttttaaaatcctgcgatccacaataatcagaggaatgcccgcatcattaatcttcttaatggacggaagcatcggatccgatacggccgccgtcagaatgatggcatccacattctgggcgatgaacgtatcaatttgtgaagcctgtgtcgtcgcgtcattctttccatctgcaaaaatcagttcacagccatccaaaccgtctgctatctcctgcgcccctgcatcagaagctgatagaccggatggtcaaaatatgccatcgcccatccgattgtaatcttctcactcttatccccggccgccttcaccgcctccgtgacagcctccccagcagctgcctttgtatcatccccggccgcttcctgattcgtctctgcctgggacgccccgccgccctgcgtactgcatcccataagcagtcccgctgtcatgactgccgctaaaaagcatccggccgttctcttccatgttctcatttccttcattctcttcatcgtatcgctccttctccttttcatggctgaaacatatatccggtcgaacagttacattgatccatacttccggccgaacggttactgataattatgcataatttttggttgagattttaaaatcttttatgtattttctataatgattttaacaattacatccgggggagtaaattcaattttatcttctgttttttatacttttttgacctggccataccggcagcgtccccacctgcgtggctaaactacttgacaacctcccctcaatcgctcaaaataaaataaatgtatgaaagaacaaggaggaacaacatgtacagttttgccaacgattacagcgaaggtgcgcatccgcgcattttggaagcaatgatgaatacaaacctggaacaaaatccgggatacggaaaagacggacactgtgaaagagctgccggactgattcggaaagagtgcggacgggaggatattgatgtccactttattcccggcggcactcagaccaacctgctggcaattgcaagggcattacgccctcatgaggctgtgatctccgccgaaaccggccatatcaactgccacgaaacgggagccgtggaagctaccggacataagattctcaccataccgtcggccgacggaaaaatccacgccgccgaagtttctaagctcatccggcagcacaatgcggagtttaccgtacatcctaaattagtctacctatctaacacaactgagctgggaacacagtatacaaagcaggaactggaagagctgagccatttgtgccgcctgaaccatctctatctgttcctggacggcgccagactggcctcggcgctgacgaatgccgctaatgatatcacgctggaggatttggccgcgcttacagatctgttctatatcggcggcacgaagaacggagcgctgttcggtgaggcgctggtaatcgtgaatcaggagctgaaatcccacttccgttaccatttaaagcagagaggcgcgatgctggctaagggatggctcctggggctgcaatttgagacgctcttcaccgacggactttactatgagctcgggcagcatgccaacaagatggccggcattctcagagccggtttcaaagactgcggtttttccttcctctccgacactgcctccaaccagatatttcctattgtcagcgcaaaactggcggaaactctggcgaaggaatatacatttgagacggagcgtgtattcgataacggagatatggctatccgttttgtcacttcctgggcaacgccggaaaaagcggtccgtgattttgtgtcttaccttaaaaactgtaattaattaaaggcagtgacctgtgcgcggagtgagcagggtaacagttcagccatgatgtattccgtgaggtgttttcgctgttttttgcgaaaatcccgagttgtgcggcgcgaaacggcgtttttttgccgtttaaaaactcgctctggtaattatcaccgttctgtgataatataaggagttcacaattgattagtcatagaagcgaaggaaaataccattatatgaattttaaagatttgcaattatccccctgctattaaaagcgctggaagaaaaaggctatgtaagcccttcccctattcaggaaaaggccattccccatgtgctggccggccgggacgtgctgggctgtgcccagaccggcaccggaaaaacagccgcatttgcgcttcccattatacaaaatctgatgaagccgtccgaaaaaaaatattcaaaaagggtaatacgctccctgattcttacacctaccagggaactcgccctgcagattgccgagaattttaaggagtacggctcccgcacctccgtcagatgtgccgtcatcttcggcggagtttccgcaaatccccagattgaagagctgcgccgcggtatagacatactggttgccacaccgggccggcttaatgatttagtcgggcagggtttcgttgatttggctcatgtggaaatttttgttctggatgaagcagaccgtatgctggatatgggatttatccatgatgtaagaaaaattatctcattgctgccggtcagaaaacagaccttgcttttctcagcaaccatgcccgcggaaatccaggcgctgacagataagcttctccataatccggccagagtagaggtcacccctgtctcatcaaccgtagatatcatcgatgcttccctgtattatgtggataaagagaataagcgctctctgctggtatatctcctgaatcatgatgacatcacatccactcttgtcttcacccggacaaaacacggcgccgaccgtgtcgctaaatttttagtaaaaaacaggataagcgccgccgctattcacggagataaatcccagggagccagacaaacggccctgagccattttaaatcgggcgagattcaggtcctggtggctacggatatcgcagccaggggcatcgatatcgaagaactctcctgtgtcattaactttgatcttcccaatattcctgagacatatgtccaccgcatcggaagaaccggacgggccgggctgggcggacgggctatttccttcagcgacattgaagagaaggcatatgtcaaggatatagaaaaacttaccggtaaagcgattcctgtcgtggatacacatccttatcctatggcagtatttgccgttcctccgaaagagacgaagccgcgcccttcaagagttacggcaaagagttccgtaaaatcacagacaaaagcccagagcggcagtcagacaaaaaaacgggcgaatacccagtcaaaaactccggccgggaaacttgttaatccgcagaaaaaagctccgacggaaaaacccgtcacctctctgaaaaaagctccggcagaatccccggcaaaaaagcgtttgaatccaccggcaaaagaaaagacaggctttttctcccggagaaaaaactccggaggaaagtaattttcaaacacgctcaaaactgatttccgggaaagtccgtgccgccggtttggcagtacggactttcccggagttaggagtcttacggcactcgcgcacacaggtcgccgtcatcaaatcatgaccacccgtcaaacgggtggtttgctcgcccctataaggggacagttaccggccagcgcctaaagacgctggctttcactctgttcaagccactatgcccttgactcgtcgccccctttaaagggcgtttgtaataccggctaccccttaaaggggtcctcatattcctttacactcagtttatccattgctatatcatacttctcctgttcctgaatgtacttcctaactgttgcctcatttagacctactgtactgacataataaccttctgcccagaagtgacgatttccgtatttatactttagatttgcgtgcttatcaaatatcatcagcgcactttttccctttaagtatcccataaagctggatatactgtatttcggtggaatacttaccagcatatgaatatgatctggcattaagtgaccctccagtatttccactcccttatatccgcataacgtttttaatatatctcgtatgctttctttatattgattataaatcatttttcgtctatacttaggagtgaacacaatgtggtatttgcacatccactttgtatgtgccatatcatgtttcttgtgtgccattaaaatcacctttcctttcttagatagtagcttgaacaactctattctatcggaaaggtgatttttgtgctataagcacttgctgcaccacccgcaaagcaggtggtttcctgtttcaggcattatcatttttcggaacacgaaaaactccaatgccttcaactggctaaagccagaataaaaaagagaaaccccgtaccgcttttacgcgatatggggtttctcttttcagcagctgggccacaaggattcgaaccttgaaaatgacggagtcagagtccgttgccttaccatttggcgatggcccaatctttattaagattccgcagtctgttttatgtcggctgcggaatctattatatcatattgatggatttcgtcaaggcttttttagcattttttgtaattttttaaacaaaatgtggaattcgttctaatactatccggcggccgcttcactttgggccggagggacggtctgttcccctgccggcaggctggtattctccggttcagttgccggaagcgtctcaggtatgccggaggattctgccggagctgcagtttcttccggtttctggctctccttcgtctcctccgtttcctcttcatcgccttccgtcacctcatcggcaatatccggcgtatcgaagtatcccttaatacttgcataggagccaccgtctctcggagccacgccggccagaataaattcataatcggcaccgccctccaggccttttatcgaaatctcacaggaatcggaactggtgtcggtgatcatggccgaatagcttccgccgttttcatcctttactgaaacagtcgggttcttccatttcaccttgcctttaaatacgacattcagttttccgtcttcaaaatccacataatcaatcttggcttttttgcccgactggccttcctgcggctcctcccccgcttccgttgatgtcgcgggcgcggtcgtatgaggctcagtaggcggcggagttggagctgtctccaatgacggcagctcagacgaactttcctgtgtggattcttctgttgtctccgctcgggaagcggtactgctctcgcgtccggagctgcttggtcccagggtgtcttccccagccggttccccgtcatcctccctgcgcaccgtataagcgcggtcggtgatttcttttgctatctgctccatcgtcattccggcgaatgcttccatgtcctcttcgccgagatcattttcatcaattaattcctgcagaaagtatgccttaccataagaaattccatatttctgcgccagctccctgacttcgcctgtgacaggggcctgctgatcatagacaactgcctgtaccttgtgttcctccaatgaggcctcaatatcaaccacgacattctggcgcagttcggaagccttctgccggtcatcattggctaccgttacaagtatggcgttgtccaaatcacttaaataaccatgacgtaccatggatccgatgagtgcatttaccgcgatgtccacatccacatgttccaaatccatgttgtccaggatctcttcggcatcgctgttcagcggctccgccttcagtaccttatcattacggttcactgaaagctcgatactgggattgacatcgattccaataaccgattcaactcttccgttctgatatatggctactcccgtacccaaaacggctacgcacaggcatgccgcagctacggttaccgctgtgcgcatcctccggtatatcctcgtcacctttgacggcccgatatggatttcctgaggtgttgtcagatcgattttatctaatatatcgggagtcagggtatccactgccgatttcagatgtttcgctatctcatcattattccattgtaagtctgagtgatcggtcaatgttctccctcctctctcagatgtttctgtaatttcttcatggcacgattgtatttggacagcacagttgccagcggcatctccagatccgctgcaatctccctgtgtttcatgcctgctgttgtatgtaacagcacaatctgccgttcctcttcgttcaggatatggagcgctgctttaagcaccattttgtcggcagcatcttctatctgcggacagaactctcccaattctccttctgagaggtcagaaagaccaatatcggcttcccttttctgatcccggaacttcatatagcagaggtttctggcaatggtaaacatccaggccagcggtttcccctgagatttatagcccgcagcagaagtccagattttcagataggtctcctgcatgatctcttctgcatcctgcgggtttcgcagaatcgacagaataaagccgtatatggttttatccgtattctgatagagtctttgaaatgcctctttgtcgccctgggcaactcgtaaaagcagtttctcatcacttaatttatcataagcgaccgcctcttccagggttgtaaatatccccatcaaaaacatggactaaatttcctttctattaatttaatgcaaaggagccgtttcttattgcacactttggaaaattttttcttcatatgcaacagcggaaagaaacagcccctttgcaggcgctgtctttcccgccagactcctgtcaaggctttccaaagcctctttaacggactgcacgctccgttcgaggagcccggcttccaccagagttccaactataatacgcaccatattgtagaggaacccatttccctccagcaggatttcaagctgcgtgccgtccctgcgtatatcaattcggctgattgttctcaccgtcgatttctttgtctttttgagtgaggaaaacgctctgaaatcatgggttccgacgagaattgacgcggcccttttcattatttccaaatcaggctctttgccaagtccgtacctgtatttcctctcaaacacatcatttttgtccgctgtttctatcctgtatatataggtcttagacagggcattcagacggctgtgaaaccggggccgggcctcctctgcggccagcaccctgatgtcttccggaagatattcattcagatagtttttaattcggatcatatcggcagcttctgtttgactgccgcaaaaagcagacagaggaagatgaaaattagccacctgacccagtgcatggacacctgcatccgtccggccggagccatgaacctccaccggcccgcctgccagacgcgaaagaacagcctccagctttccctgaaccgtctgctgtgtgttgccctgcttctgccacccgtcataacgggttccgtcgtactgtaataaaattcttatgttcttttcttccacttattctgaacccccgctttatttttccctctcttttcagctttccctgatatcaggaaacaaatacaggcataaagaattgtacctgtcacggctccgctcatatccagccatacatcgctgatctgaccggatcgtccttctgtgaaaagctgtaatgtctcgtccacaaacgggataaaaaatataagcagcatatggagctgtcttctgaaagctgcgccgcagtccagatttctcatgctctggaacagcagaatgccaagaagcgtatattctgaaaaatgggcgcacttcctgataacgtgttctgtcagccatggggccgaaagtccggccgcaccaatcgcctgatgtaccagacgcatgacaaatccactttcctcagaagaaagatccgccggtgtaagggaatttgagaagataaataccacataggccgccagtaccacatgccatattgttttcttatacacggctttaatgctcctgtccgatatctaatattttactcgattttatagcctttaccgcccggtggattgcctcctcatcctggaccagggccatcctgacatatccttctcccgaagggccgaaagcgcttccgggggtcacgagaacccctgtctgctcaaataactcctttacgaattcgagagaggtatcaaaatgtccgggtactttagcccagacaaacattgttgcttccggtttatcaatcttccatccgatctccgccagcccttcacagagcagatcacgccgtttttcgtaggctgccctggtcactgccacacagctctgatcgcctgtgactgccgctgccgccgccttttggatcggcagaaacaaaccgtagtccatatttgattttaacgttttaagacggccgactacctcccggttcccgatgcaaaagcccactctcgcaccggccagcccgtatgtcttggaaagggagttaaattccacccccacttccctggccccggaaagcgcagaaaacttccgcagctctttccgtcaaagacaagctcgctgtatgcgttatcatgaagcacgattatattatattttttagcaaaagcgatcaattcgcggtagaagctgtcaggcgccacagccgtggtcgggttgttcggataggagacaatcatcagtctggcctccatcgccacttcctcgggaatctcgctcagatttataacgtaatgattctcttttttctgcggcatatagtacagggacgcgcctgccagagacgggccgtccgcaaatatcggatagcagggatccggaaccagtaccctgtcgccctcgtccacaatcgacagggcaatatgggccaggccctcctgggagcccagaagagaacagatttccgtctccgggtcaagctccacactgtaacggtttttgtaccaccgggataccgcatttaaaagttccttctgatcactgatagcgtaaatataattctcaggcaccagacattcttcgctcagaaccttcaggatatggggggcaggaggaatattcggcgcgccgatactcaaatccacaatctcttttccctcctccagcctcctatgtttcatctgggccagcatcgtaaaaacaccttccccgaagcggtccatcctctttgcaaattccatctgatttcctccgttcttttgcagggcagaaaaagccaatttaagtcattatattacaaaggaggctgaaagtaaagagctggcggagtgttaatccgccatagccttcacagccggctctatgacatcgcgctctgtcacggttgaataatcaagggccagaagttccttttcatttgaaataacgtataaatcacgctcccggtccggccactcactgatataattataatcaggatcctcctccgtaagcttagcggtaccaatccaccggtagtggtatcttacaaccgacgttccgccttcgatccagctttcctttatctgcacatcccaaacattccccctgtatacggggtatgtttttttagtagattgaatgatccagggcagaggacttttgaaatactccattgtgagattttgtactgttcccgcattatcccgtatgacgccgctttctctctggtaaaggcacagcagagtctgctggcttttttcgctccatccctcctcgaacgtgtaaccgcccagttcttcgaatgaagacgggaattcggcgatccgatcgtacctgcgttcttccgtatccttatcgggaaagagcatgacaatctgcatagtgaaaaataccagcgccacagtcccgacgataacggttgcaacgatataaatcatggcttttcccgtttttgtggtattttccgtctccctcaccatctccagtattttgccgcagtataaagcaaacattataaacagaatcaacagcagtgtgattgggatagcccttgattttcctcctgaacagatcacaaatgcaagcattataataattatgattcctcccgctatatttctgaaccttacctgattccaggtagtaacaggaaatttatctgtttttctgagacttctctctgctttccagaaccataaagccggcccggccagccgtccggtcataatcagaatcagtatggcgtaaaaaccaatcagtattatattttcatacgatgagaatcggattcccggctcctttatgaacgaagacagcatccacagccataatccgattgtaaacagctgtcccagcacctttccccaggaaaatgtaattcttctctggttctccagccgaatctccgggtcggtctcgataggaaccaaagcttcgtcctccgtataaaagatctgccacagtgtccctccatactggagtttccagcccgcctcctcacaatactcacggaactgccgggcgttccagttgtccgcgctgtccagccccgaactgccgggaagaacagccacacaaaaattcagttttttcggctcccccttttcaaatcgcaggattccgttctggtggatatttgttaaaaaccatcccttagccgccttatattccaggtattcggcaaacgcctccgtctcgtattcccggaatgtaataaatttataccgtatttttgccataaacggcttccccttccatccatatatgcctatttcataaagacactgaaaatatatttcatatcaaaacataagaagtaaccgaaaaataagatgattacggccaggataattctcaccctgagcttgtcggcgccgtttaccccggcattctcttttctgtatctgaacgcctcccggcacatccctctgaatatgacgagccagcacattgttttcatcagaggcagaatccctgctgccgccagaaccgtcgcggcaaatgccatcattttcaggctgcttctgattttaatctgccccagtgtgctgctgttcaacgacgcaccgctttccgctgcatgaaccgctttgttataccagcatatcatactgattctccctccgataaaaatacaggaccacagaaggagcagcgcgcaggcaacgccctgatccgccgatttaaatgtcattcccgaagcaaaccacacagccgccgctaacgcgatcagaagaattgcggcaataaagtcgattgcgatcagggctggctgcatcataatatccccgataatttcgagttttgagccgggatccgtttcgatcggcaacagactctcatcctcggtataaaaaatctgccagacgattcctccgtattccagaatccagcccgcctcggtacaaaaatcgcggaacattttcgtatcgccgctttcatctatatcaacgctgctgcttcccggcatcaaaaccgcattataacgccgctttgccggcttaccttttctgaaacgccagacgctgtcaaacacatagccgtcaatataccagcctttccctgccatctcctcgagatatcttgaaaaagctccgccttcatattccctaaagttataatacctgtaagtccttcctcccactacagtgcgcctcccctcatatattcccggccttcttccaccagtgtttccagacgccggtattcctcccggagcatggccagcccgtgatctgttatctgataatatttccttctgccttcgacccctgcctctttaatcatatcttctttctcaaactttgccagcagcgtgtataaggtacccggcccgatctgcattctccccctggatatttccatggccttctgcgatatatcgacgccgcatcttggttccagcagtgccagcagaatataatacatctgttccgtcaggctctggaactgctctctcgccataaacagcgcctcctctctcttttattatcgaatatcgatattttataatatcattatattatcgatattcgataatgtcaatttatacggcattacaactttcttacgattataagaatcgcgtggatctgtttttctttattgttcacacggttgtgttccacgcgggacattcccgtgtgaaaagtaaccattctgttctttacggtaaaatgaaatgattcctgtcgtaggaaatcagtttctccttctgcattttcgacagttctgcggacagcgcgctgcgatccaccgccagatagtctgcaagctgctgacggttaaacggaatttcaaaccggttctttccctgtttctcagcctggtaagaaagataagacagcaccttttcccgtatcgtttttttgctcatatggtcaatcttagtcgtcagagtcaggtttcttcccgctatgaccttcagcaggttctgtatcaccctggaatggaaccggcatgccatggaacagaccgtcaagagacgccccacctccagaaacaatacttccgtattctcttcggccatcacactgaccataaggggttccccgcctgcgcaggcatagctctcaccaaaaagctgtccttctcccatcacggcgataatctgccggttcccccaataatcttcccgtatcacctgaacggagccggtaagcaccataccgacagacgttatggtatctcccatgcggaagatgtactcatccttcttatacgttttattaacggcggaaaggcatttcaggacactttccgcctcttcctccgaaaatccccaaaaaagactggtatcggtaaaatgaaactttttcatttttatctccttttcgttgtaattacaacagacatattgtctcaattttaatatactgtagtcacaagttcaagagaaatataatgattgttactgcacgaacctgtctgaactgttacaaaccggacgcgaattgaaacggcaaagaaagagaggagaaatagatgataagaagaattattaaaattaacgaagagaaatgtaacggctgcggtatctgcgccgccgcctgtcatgaaggcgccatcggcatggtagacggaaaggcaaagcttttgcgggacgactactgtgacggactcggtgactgcctccccgcctgtcctacgggcgctattacttttgaggagagggaggcggccgcttacgatgaagcggcagtcaaagcaaaagctgcaaaagaaatgggggctgccggtccggtacacacggccggtcattcagaaactcctcttccctgcggctgtcccggctcacagagccgcgcaattccccggccttcgatgaaggcggaaccgtcggccgatagaagcaatgccgaaacggcgccggacgaggaccggaagggctgctctgccgttttgacaagccagttgtcccaatggccggtacagattaaacttgtcccggtaaaggctccttattttaacggcgccaaacttctgattgcggcagactgtaccgcctacgcttacgccaatttccacagcgaattcatcaagggaaaaatcaccctgatcggctgtccgaagctggactccgtggactactctgagaaactgacggaaattattaaaaacaacgatatcaaaagtgtaaccgttgtccgcatggaagttccctgctgtggcggaatcgaacatgcagcaaaaaatgcgctgttagccagcgggaaatttattccctggcagattgtcacaatttccacagacggacggattctggattagagatgttactcgttgtcgtattcccatatgaaaaggacgaaaaataatgaatgataaaaataaaatgttttgtttccaatgtgagcagactgccggctgcagcggatgtaccggaaacgccggagtctgcggtaagacctcttccgtatccgcactccaggatgaactgacaggagccctaatcggcctggcccgtgcctgccgggacgtacctgtcacaggcaggaccagccgcattattctggaaggactctttaccactgttaccaatgtaagttttgacggcgattccatcaaggagatgatacgccgggtacaggaagaaaaagccgccattgttccgggctgccggggctgcggcgccccctgcggccaaaataatgattacggcatggccggactgtggtacggggacgaggacatccgctccttaaaatcactgattcttttcgggatccgcggaatggcggcctatgcctaccacgccatggttctcggatacagtgatgagactgtaaaccgctttttcttaaaagcgctgttttctatcggagaagactggggaatggaggaactgcttcccatcgtgctggaaacaggcgaggtcaatttacgctgtatggaattacttgaccgggccaatactgaaacattcggcaccccgattcccaccacagtcccgctcacagtggaaaaaggcccgttcattgtcatcagcggccatgatttatatgacttaaagctccttctcgaacagacggaaggaaaaggcatcaatatttatacccatggggaaatgctcccggcccacgcatatcctcttctgaaaaaatatccgcatttgaaagggaatttcggaaccgcatggcagaaccagcagaaagaatttgccggtatcccggctcccgttctgttcactaccaactgcctgatgccggttaaggaaagctactccgaccgcgtattcacgacagaagtggtagcctggcccggcctcgtccatattgacgaagataaggattttacccctgttatcgaaaaggcgctggaactcggcggctacccggagggcagggaattcaccggaatcaacggcggaaaagaagtgacaaccggttttggccacggaaccgttctctcggccgcagatcaagtcgttgacgcggtaaaaaccggagccgtcagccatttcttcctggtcggaggctgtgacggcgcacggcccggaagaaattactacacggaatttgtaaaactggctcccgatgacagcatcatcctcacactcgcctgcggcaaatacaggttcaatgacctggaccttggcacagtctccggcctgccccgcctgatggatatgggacagtgcaacgatgcatacagcgccatccgtgtggcttccgcgctggctgaagcgttcggctgcagcgtaaatgaccttccgctgaccctggtgctgtcctggtacgaacagaaagccgtctgcatcctgctgtcactgctccatctcggaatcaagaatatttatcttggtccgactctcccggcattcctctcggagaatgtactgggatatctggtggaacagttccagatttcaccgaccggaacgccggaggaagatttgaagaagatgcttggaaaataataaaaaatagaaaacgtataaaatcccggctcagcgccaccctaataccgaggtgataatatggcatcctatgtatccccggcagtccgggacaaatttgagtctctgtccatcgatttaaaaaactgtatcctggagcgcaacgtccgcctggaaacagttttcgatttaatccgggtattggaagaaatcgtggcggagggagacaattaaaaccactgcggtatatttaaaaaagctgcattccccgccttgactcacaggcgggaatgcagctttttccttagacggagatggagggatttgaaccctcgcgccggttacccgacctaccgcatttcgagtgcggacccttcagccacttgggtacatctccatatcgtaaggtgcagccgtttgtaccacaactgcacctttgatattatactaaatatttttgaatttgtcacccattattttagtattattcagttcctttctcttatcggattacgattcttccctggccggccggttcagcataatcggcgcccacactgccgccgagctgattattaatataggctgaaagaatgtccacatctaccattacatcatcctgaatgacgttacagccgccaaacatcaccataccgtcgccgccctctttcaacatatagttatgggatgcaaccgtgtaaatccggtccaaatcaagcggttctccatcaacgaggatatccgccacacggtaagcgccgtccacttttataaaattccccttatcatccacctttacgccggatggtacggatggatcgatccgatatgtaagtccggacacctgcaggaatcctccgctttcctccgggtaattcctggaagccatttcaagagcatccctgatctggcggcctgtggcctccacaacacaccccatgttaccgtaaggaaatacggcaagtgtatcattatatgtaatgtttcctgtcttgatatcggctctgattccgcctccgttgctaagtcctatatcggctcccaaaaccatgcggtatgcatcggcagtcaaatctcccagattcgtctcggcattcctgatcgcccgttgtccggttgccggattcagagtcgtcagattatagtctgagtacccgagaaccaccttcagtatctcctggtactgtttctcgatgcccttaatatatgcatccgttgcataatcgaccgccttcccctctgcattgatcaggacactgccgggtattactaatttcattcccgtcctgagcagatccggatctgtaataagacttctgttggcggcataaagctccgtccagcggtcatatgagccaagttctcgttttgcaatccggctcagggaatctccctttctgaccgtatattcgacctgcggtgaatctccgggaacctgggcaaccagctccgctttaatggttccgtctgttttaattgtcatcttacctatattttcaagcttcgtccccgtctgagtgataagaatctccctgccctctttatttttcaccattttagcaggaaccgtttcatgagaatggccgtcaattaaggcgtcaattccactcgttgcggcaaccacccggtcggatgaccagcgctctgttatcccgttctcaccgaggtggcccacggcaataatataatccgcacctgccgccctggctgcgtccacagtctcctggatccggctgtagagtgcctcgcctgtattgtcctcacagaatccgtacagataatttccggccccatcctgaaaataagccggggatgatttggtaaaactctccggtgtgcagatcccgacaaaagccacctgcgtgtctccgtaagaaaacatcttatatggggcaaataccggctttcccgttgccagacttgtaaaattgcaggagtagtaaccacagtccagcttccctgccaattccaggaatctgggcatcctgtagtcaaattcatgatttcccggcacggcaaaatcatatccgaccttattcatgatatcaatcagataaccgccgtccgacaatgttccgataggtgctccctggatcgcgtcgcctgcatccaccagtgtcacatagggcgtctccctcttcatctgcctcttgtaaagagccagtccggcgtaaccgatattatcatcaataccgcaatgcacatcattggtgtagagaattacaatatcctgcgacgggaatgcccgttcattcccgctgccccgggcgcttatctgggctcctgccgctgtcagcggggttcccgcgataagggagcaggccgttaaaaaagtcagaagcagagacagaaatcttcttttcttttgattcgtcacgttattacctcctatatgtatagccgtattttgtagcttaaatgcagtatatcatattggatgccggaacgcgagtttaaccaggtaaatgatatgtaaaaccacataaaaagacggtttgcaggactctgcggaaattatgccgcaggcccctgcaaaccgtcttctattttatgaaagtatgggcagcagggcggacaaacttatcctgccgtaccggctattcgttgaaataagcgtcaataccgttggctattcccgccgcaatcagctcctggtaatcgtcctgcgccatcttctggtcttcttccggattgctcatgaagcccatctcaataatcgtcaccggtattgtgcaccagttaatgccgctcatgctgtcggtctcctgcacacctctgttcttgaatccggttgccgcacagacgtaatccgttatcttctttgacaatgaatagcttttagcatggagattcccgttatagggatttttggccgtctggcacatggacaatgttccgtgtacgctattgttgtccagcgaattggcatgaacccgcacaaagatggaagcgccgctcttgttggctatctccgccctctccgcattgcttaagttcacatcattcgactctcgtatcataatgaccttgtatccgcgttcttccagaatccgcctaagcttctgggacaccgaaagcgtcagtttatattccggcagtttcgtgctgatcccctccgcgccggccgccaccttggccttcattgtcgatgagccgggaccgattggttccttttcggaattccctttagcctgatggcctgcgtcgatggccacgacccgtccgcctgcagccgctgaaccatccgcgccggcctgcaccggctggttttccagcgccatcacattctcgccgcctgctcccgtcggatcctctttggaaaggaattcagacatgacatagcattccttatccttgtatactaccctgctccagccatcgctgtatccggttctcttgatgctgtcgcctgtattaagctgtgttacaatgctgaactgcgttccgcatcccttacggagattgaccttatcctccaggatataaacagtctcatccacttccgtaaaaccgttggcagtcgtcaatccgctctccaaagagctcatctctgccaccgcggcgccgtccgcttcctgtgccgcctgcacgtcctgggcatcttccagcacaagcattctgctttccccggcttcaccttcctgtgcgccttccacgctctcacccggcgcctgagcgtcctctgactctgagacctgcgtttcctcccgggccggcagcggtacctgctcgtatttaccgccgcagcctgtgacggcagctgccgtcagaaataagcttaacagtattgccgcccccctgcatcctgctgcttttatcataaaatagtacctcctccgacaacatattctccatcgtagaatactacggcctgtcccggcgccaccgctctctgtggatcgtcaaatacgcactccaccagatcctcaccgattgttcggatcatgcagggtgcgcccttatggctgtaacggattttggcagtcactttcattccatcgtcaggaagtccttccactgccatccagttcagcttaccgcaggtaagtcttctggaaaaaacgtcctcattgtctcctattactacttcattcgtatcagggcggatttcgatcacgaatacgggacggccaagcgcgaggttcagtcccttcctctgtccgaccgtatagtgcgtaatgcccttatggcggccaagtacacggccgtctttatctacaaaattgccttccggtaaacggcaatcggtattttcctcaataaatttagcgtaatcgtgatccgggataaaacaaatctcctggctgtccggcttatgggccacgttcagtccaatcttgtccgccatcccgcgaatctcatccttcgtgtattcaccgaccggcataagcgtatgggaaagctgatgctgggtcagattgtacagtgcatacgtctggtccttcgccgctgtcgcagatttgcgcagggtataacggccgttctcaagctgctcgattctggcataatggccggtggcaatgtaatcagccccgatgtccatactcctcttgagcagtgactcccatttcacaaaacggttgcaggcaatacagggattgggagtctttccctcgatatactcctgcacaaaatagtccattacattttctttaaattctcttttaaaattcatgacgtagtatggaatccccaggttctccgccactcttctggcgtcgtccaccgcgctcagcccgcagcagcccccgttctcctcctgaatctccggctcttcatcctgccagatctgcatcgtcacaccgattacgtcatatccctgttccttcaaaagccaggccgccacggaggagtcaactcctccggacatgccgactacaacttttttcttttccatgtatcagtactcttcttcgacttcttcctcaccgatgtctgtctttggcttagtcagtccttctattttgataccatgcttctctgaataatcccagagcgccgcatggattgcttcttctgctaacaaagaacagtgtaccttaactgggggcaatccgtcaagtgcttccatcacggctttattcgtaatctgcatagcgtcctgcacggatttgccttttacaagctcggttgccatactgctggtcgccactgcggcgccgcagccaaaggtcttgaacttaacatcacggataatctggttgtcgtctatatcaagataaatcctcataatatcgccgcatttcgcgttaccaaccgttcccatgccgcttgcgttctctatttctccgacgtttctcggatgctcgaaatgatccattactttttctgaatacatgtattttgctcctttcagcccgtatctcaaatattatgcgtcctgctgcacacgttatgcgtgcgccgacgcctgttttttcatgtaatcctcgtataaaggagacatagctctcagccgcgccacaatcttcttaatgctctccacggtaaagtctatctgctccatcgtaatttcttcgttcagggtcagacggagagagccatgggcaatctcatggggcaggccaatggccaaaagcacgtgggagggatccagggagcctgatgtacaggcggagccgctggaaccgcagattccgtccatatccagcataatcaggagagattccccttctataaactggaatgcaaagtttgcattatttgagaggcgttttgatggatgtccgttgagacgtacaaaaggaacttccttcataacacgttctatcagatgatccctgagggttttctcctgctgcgttctttctttcatcgtagccatagctatctcaaccgctttgccaaaaccgacaattcctggggtgttctccgttccgccgcggcgtttcctctcctgggcgccgccgtggataaatgcttttgtcttaaccccggtgcggatatacaggaaacctactcctctggggccatttaacttatgagcgctggagcttaacatatcgatatggcactcatccacattaatcggaacgtggccaaatgcctgtaccgcatcggtatggaacaaaattccgtttttattcgcaatctcgccaatttccttaatcggctgaactgtgccaatctcattattggcaaacattactgatatcaggatcgtctcgggacgtatcgctttcttcagctcatctaatttcacaacaccatactcatccacatccagatatgtcacggaaaagccgcgattctccaggtattcacaggtgtggaggatggcatgatgctcgattttagtggtaatgatgtggtttcccttgttctgataagcctcagccgtcgcaataagcgcccagttatcagactcggtaccgccgttcgtaaaatagatctcgttcggcttcgctcccagtgccccggcaatcgtctccctcgcatgagcaatggctttcttgggttctgccgaaaaatcatatacggaagaggggtttccgtaaaattccgtaaaatacggaagcatcgcatctacaacctccggtctcgtctttgtcgtagctgcattgtccagataaataatctgtttcataataaaaaatccgcctttcttcttatttgtagtaataaaggtaaaagcttcatctacgcttcttattatatagtaaaatccagaaaatacaagtaggaatgattactaatttataaaaaaataatattttacctctgaaaaagaccttagggtctatattatagtatgaaaacaacgtgataacagtgccttattgtacagaagggcattttactatatttccctgcggcttacgatcttatgcttcaatgaaattactccacccgaataatttcacggctgtgaaatatatatattaataagtctcttttcggagtcctcatgaaaaaaaatccactaatcaccggaactctcctgcttacagccgccggattcctgagccggattctcggtttcttctatcgcatatttctgtcccggaccatcggggccgaaggactgggcatttaccagatgatatttcctatccacggaattgcctttgcactctgcgccggaccaatccagacgtccatctcccgtctggccgcagccaatgtgaagaaaggccggagtaccttccgggccgggctggcgatatcactgaccatctcggtaatccttatgattgcgatacgtttttccgctccctttctggcagaacacgttctgctggaaccgcagtgcgccccgcttctgccgataatggcgctgtctattccgttttccgccatccatgcctgtatctgcggttattactatggcatgaaaaaaactgctgtgccggctctgtcccagctcctggaacaatttattcgcatcggcgcagttttactgatcgccaatgtcgctgctacaaatggaaaaacgatttctgtttcactggctgtctggggcatgctgatcggtgaagccgcatcggcaattttcagcttcctctactacacattcacaacagacgacagaagaggctcccgcacatcacagcctgcctacagctttctatcgctggcagcgccattaatggcaatggccctgccgctgatgggcaaccggctgattctgggctgcctgcaaagtctggaagctattttcgttcccaataaactgctggaattcggcctgtctaatgccgaggccctgagtacatacggtgtgctgaccggtatggcgctgccctttatcttttttccgtcagctatcaccaattcccttgcggtcgttctgctgcccactgtctcagaagcacaggcagccggcaatgagagaaaaattgaacgcacgattgccatggcgctccgttacagcctgtatatgggaatcctctgcatcggaatctttactcttttcggagacggccttggaatcagcgtctaccataataaagatgccggaacctttatcacgatcctggcatggctctgtcccttcatgtatctgtcaaccacgatgggaagcatcttaaacggcctcggaaaaacatccaccatctttcttcacaacgcgatctcaatgctgatcacactggccgttgttgtattctgtatccccatgtacggcatccacgcctatctggccggcctccttttcagcgagctggtacttgctgcgctccatatccatactctggcaggccaggttcccgtgagactgaatgccggcacaatgattgtaaaaccaacgctgtgccttctggtcgccatcggtatcctctatgctgcagcgccgtcgctggaaacgctcaggccggccctgcctacggaatttctgtttattgttgtgaaagccctgatcctctgtgttctgtatggaggagggctgctgcttctgcataggaaaagttgagggaaaccagaacaggagaatcgagtaggaggcggtgactaaccgccgtcctctcacaccaccgtgcgtaccgttcggtacacggcggtttcaatagttgacgtgcagagactgataggctgtggttaaatcataaaaaccccagtttgtcagtctttctttacttaaggcccagttgactgctttgtttccggcattaaaccagtatcctttacggtcgtatgctatggttgccgcatattggctggctactcccagacctatgagtttcctcactcttgttcctggctgtttccactgtttccagatacacatccgtatccgtcgatacagccatccattcaggctctcgatattgttcttcatatccgctatcccgtaatagttcagccatcctctcatgtatacttttatcttttccatggttcggatgatactgccacatctgcttcgggaagtaagctgacgcagtttatccttggctttcttccatgactttccatggacacggatataaatcccttttccgttcttcccaaaacaaaagccaagaaacttaaaatttcgaattgcaaacacgctgactgtccggctcttttcccggtttactttcagctttagtgtttcttccagatatttcgtactgctctccagcagacgttctgccgcacgttcactcttcgccagcagtacaatatcatctgcatagcggatacacggtacgccccgtctgtgaaactccctgtcgaattcattcagatacacgtttgctaagagtggggatagattccctccctgcggtgacccttcctctgtctctgttacaacgccgttttccatcactccgcttcttaggtaccgctttaccatctgtatcaccctttcatcctttatctgttttctcaacagattcagcagaatcgtatggttcagcgtttcaaagtatttcgacaggtcgaggacaactgcccttgtataaccctgtccgatatactcttttatcctgagaatagcgtcttttgcccctcgtcccggacgatagccaaaactatcctccgaaaacagcggctcataaattggcatgagttgctggagcattgcctgttggatgattcggtctatgacggtaggaatgccaagcttacgtacccctccgtccggcttcggaatttccactcgtctgactggaaaaggggtatattttcccttccggattttctctatcaactcgtggttgtgttccttcagccacagcagtgccgcttcgactgtcattccatcgattcccggcgctcccttgttcgccttcactcttctgtaagctctgttcaggttgtccttttccagtatcttacctagaatgtccggctctgcactgtccctttccttccatatccggttaaatgagcggtgcgctctcacataccctttgcgttccgcgctatctctttgtgagcagctttctttgttttctgcacccatctgctcattcctcctttccctgtcgtactaaagactcctattgattcggtccttcactgaaaaaaaacagctactatggcctctgctgacttctgtacgttcagcgttatctcacaataacgtttactcctttcgaagcattccgtacagacctccctgggtaccacacatttctttccctccatccatctgccgcatttactgcacatgattccgtgtagctatcgggcttcatcttgagatgcagacttaccctcatgcacagccttatatacgatttctgttcgtcagaccagaggtttgcccgtgggttagtaggttccccacatccagcttccttcatatttgcagtcacctgcaacacccttgccttcggctatgtccttcccgctaccgggcagacttgggactttcacccttaagaaacgtgcgccgccaggcgcacatcgaaaaaggagaacgcccgctgcgacgttctcctttctcccttataagaaaatcttttaaaaaaacagctccggtacaaacattgtaattgccgggatataagtcaaaacaatcagaatggcaatcatgactgcaagaaatggaataactcctttaatcacgtcgtcaagagccgcctccccgactctgactgcaacaaacaggttgattcccagcggggagtgataaagccaatcgccagatttactaccataataaggccaaagtgaatcggatcaattccaaagctctcgatgatcggaaggaaaagcggagccagaatcatgattgagcacatggtatccataaagcagcctaccaccagcagcatcagattaatcagcagaaagataacccatttattatcggtaaactgcatgattgcctgggctacctgctgcgggatatggcccacggtcaggatctttgtaaatgcggcggcgcatccgataaccaccagtaccgttcccgtagttagagctgcactcctgataacataaaatacttccgataatttcaattctttgtatacaaaaactcccacaatgaagctgtaaatgactgacacggcggccgcctccgtaggcgtaaaaataccgccgtaaatgccgcccagaataatgacaggactaattaacgcccatttcccctcccagacggctctccccgcccgtctccaggtaaacggctccgtgtctcctttatatcccctttttttgcatatataataggatactccgattaatgccaggcctatcagaataccgggaataaagcccgctgcaaacagccttgtaatcgactgccccgtagaagtacagtagacaaccataggaatactgggcgggatgacaactccgatactgccggcagccgcaatgagtcccagcacaaaccgtttatcataccctttcttaatcatggttgggacaatcattccgccgacggctgccacggtggccggaccggagcctgagatagccgcaaaaaacatgcatacaactactgttacaatcgccagtccacctgttattctcccaaaaaatacgctgcagacatccagcaggcgcctggatattccgcctcctcccataaactcacctgcaagaataaaaaaggggacagccataaccggaaaggaatctaccgctgtcacaagattctgggcgatatatccgcctccaagccccagctccgcgttgagcagaaccgttgcaagggacgaaattccaagcgcaatccctaccgggacattcagtataatcatgataacaaacgttccaaataaaacagcgctagtcatccatctcctcccccttcctcagcttggcaattctcagccatatgttttgggccgtccggtaaaatgtaagcacaaagccggcaaacggagccatataaacgtatttcatcggaatggataaagcggccgacacctggccgagcatgcctatcttctgaatcagcattgctgatgtataaatgataaaaccggcaaagcatagtacgatgatatccccgatgatacggatatagggacggcatctttttgggaacaggtataaggccgcgtcgattttaatatgcttgcgctccttggcggcataacttacggccagataaatggaccagataaaaagatatcttgccagttcttcggaccagctcagggagtttcgcatcagatatctcatgataacctgcacaaaaataatcaagctcatcaatgacagcagcgtcaccagcaggatatcttccagatgttcatcaatttttttcaacatagaatattccccagacttcatctgttttcaatcacctgccgcttttattgaccgaccgcttccatagccatatcaaacagctcgggatgatccatcttttctttcaccagagagttaacctcctttaccgcttctttaaactggtttctctcctcatccgtaagataaataatctctgtcgttttatcttcctcaatctttttaattctgtcctgctcatactcctgggctgaccctcgttcatagtcggtcgcttccctggccgccttcataactgcatcctgatattctgccggcatcccattaaatgtctcattattcatagccagaatcagagggttatatatgtgctgcgtcatgatcatatatttctgtacctcattcagcttattgtcataaattaactccaccggattttcctgtccgtctatggtcttttgctgcaatgccgtaaacacttcgccgaatgccatcggagtcggattcgcaccgagcgctttccagtaggcgatttgaatttcattctccataacgcggactttcaatcctttcatatctgccggcgtatggacctcacgatcattggtggtaaggtttctgaatccattctcaggaaatgacagcgtttttagatttttcgccttcagcccctccgcaatatgctgtcctatctcaccatccagtatctcatatgcctgctctctcgtattgattaaaaacattgtatcaaacagatatagatcactgtatgcggcagccaggggcgccatattggaaagtgtgatgtcgatgtcgccaagctgcaccgcctccaggacctcacggtctgaacccagcgcattatctgcaaagacattgactttgaccgcaccgtttgtctccttctctatcacttccttcataatgtttccaatgtctttgtgagactgcggtattcctacggcaatcttgagcgtatactgcgcgttttttgcctcctccgttttttctgattcgtccccctgcccctgtacttcctgctgtgtttcccggccctgtgccggctctgtccctgcgctgctttctccgctcttaccggaacagcccgtaatcgctgccgccatagctaatcctgtgaatgctgcaaatagtctctttctcatttccctctccttttgcttctgcttttgttatcctgttaccccaagagctttcaaccgctcccgtatagcattcttttccccttctgttgcaggaataaaaggacctcttgggctgcattttacgattcccctgatttccagcattgcatagatagcaagctgggtcgagcgcgccagatacattatgtccctcatctcatttacttcaaactgcgtattcctgcagtcctcatacctgccttctatcccttcgttgtacattttccggcatatttccggaaaggcattggcaatgcccggtataaatgccctgcatcccaaaacacacgccgacagccacattgcttccgttcccagaactacgtcaaagttgtcgtctttcaggagccgcatataatttgcatgcagcatgatatcaaaggttgcatccttaatccctctgacccctgtgtcttttaatttttttatcgtcttgagttccatcgggtatccctggaatccgggattgttataaacataaacaggagtctcctctcctgccgccttcaccatggaactataaaaagcacagatttcatcctcgttatgtttatagtaatacggacctacagccgatacggccgccgcgccggccgccgcagcatgtgccgtaagctttgccgtactccggctgtccgcggttcctgtctgtacaataacagggatttttcctcctgcggcttttatcacagtttccgtcaccagcatccgctcgtccggtgtcatcaggactcctcctccgtaagaacccgtgataaaaagcccgtccactctgtcacgcaaaaaaccgaccagtgctttaattccctcataatccacctctccattttcctggaatggggtgagcatgggcggaataactcctctcatttgaaacatgcctctccctcctgttccctctcttttatcttgttaaacgctattgccactgctccctgcaccgtaagcttacctatctcttctttgtcataaataaattctatcttcaggtcttcgccgtaccgttttttcaagagatattcgtacatacggcatcggttttcatgtccgtaaaatatgtagtgcccgctcagatatcctttctttctcatctcatcgaacgccttcaaatcatcggctgcaatcgccgcgttagcgaatatattgcgctcccttccgtctgttttaagcagcacctgcaaaaacctgggcattagaagggtccgtccgagaccggcatgctccacacagtccactgcgatgtccaccagttcctcataggtatatccgcccggttcctcccccggctcctctttcaggctttttccgatattggttgaattaactaatgcctcgtaaaactggccgctgatcgtcgtattgctggccgccactctctgactgccgtctatgtacatcactttggtgtgagaactgagagccacaatgctgcacggttcctttatcttgttgcgctcaatgattccgatgcactgcacctcctcccctctcataaagtcgatatcccgcaggtcctgcgctcttgcatgttccggataactgtttttgattcccctgataaaatataccggtctgtgaattggtagcacggattcatccgagacttccaggattccctccgccagttccgatactcctgccggagcaaccagatggggaatctctatcagacctatttccgatgtaatcatacctgatgcaaccgcaaactccactttttcatcctcaatcccatgttccctcaatatctcaaaaaacagctccgcaatcccctgtctcaatgcgtcccggctgcccgtaatcgaagtatcgcgcacccccaccttccggctgccggaagctaaaatctctctgttttgatccactatataaattctcgtatttgttgttccgcaatctatcactgcaaacatactcaggcccctctctgaattttggctggttgacgggatgcagcggtttttcgcctctcaatactctggccgcctcctcagccaccttcttttgcagacttttcaccgcttcctcagaataccaggctacatgtggcgtaatgattacgttttccatttgaagcagtggattatccggctcaatgggttctttttcacagacatcaagaccggctcccgcaatctctccctctctcaaagcccgaatcatatctttttcgcagataacgccgcctcttgccgtattaataataaatgatgtttttttcatctttttaaatttatcgtaatcaaacagatggcgtgtctccgggcccagggggcagtgtacggacaaatagtcactctctgaaagcagtgtttcaaaatccacaagatccactcccagtttagccgcggtctcctccggtatgtatgggtcataggctatgatccgcataccaaagccagacatctttctcgcaaccagagccggtatcctccccagtccggccagtcccagtacctggccttccatacggtagagcggttttatgaggctgtaatcccactttccttcttttaccgacgcggccaaagccggcagctttttcgcacaggccatcagcagagctatcgcatggttggacacctcatcaaggctgtaatcaggtacatttgcaacataaattccatgttccgacgccgcttcgacatcaatattatctaccccgattgcatacctaacaataagcctgcaccgtttcagtccctcgatcacatatctcgtaaccggggagaactgtacgattaatacgtctgcatcgcccgccgcctcgatcacctcatcttcagtcttgcagtggtaatcaaaaagctccgtatcctgaatctctgaaagaacctgccgctccaaatccaggttttcataataataatcgctaattacaacctttttttccctgtttgtttcccccataacgccctccaattgttttatacaataaaaccatgttttatttttatttcgttaaaaaaacctgtatttcccctctctcgtgttttatgccggacagcccaatcttgctgatattctgcccgcagttctgacaatatcatgaattaactcttctcttctgtcaccgtctatcagctcctggattccgcaaatactgatccctgccaccatatctttattataatcgaatacaggggcacaaacgctggaaatatatggttcattctcaccatcattaaaggagtatccttcttttcccgcttttttaatcaattcatgaagttttgttttatcggttaccgtcttatccgtaaattgttccacctgtacatgattcagatattcctccagttcctcctccggcatacgggaaagaaacagccttccgattccggtggaatacagttccctcattcctcccggccggatcatcagctgcgcccacgacggagcaattcttggtacgacgcattcaatcatcagtaccttatcctccctctgaattccaagataacagattacatcttttgtgtctgaaatttcctggaggtagggaacggctattttccgcacatccagatggttttttttcaatatgctgagatggagaggcaccagtccaaggctgtaggttttattcttttcgtcgaattctataaatccttctgaggccagtgtatagagaagccgaagtgtcgagcttttgcctactcccgtcattgcactgatctccgacagtgacatttcaaaatgattctcatcaaaaagttttaaaatctttaatgccttctgcactgcgctgattgtataatccttacttgtattcactggtttccctcctgttttacctgatgaaatcttttaatgtgattatatcaactaaaaaacttcatggcaagttgcttaattaaaacctgacgatacctttaaaaacatccttatttccgtccgcccactttaaaatttctgtcccggcatcttgaaaactgattctgtccgtaataaaaagtcccgggtcaatacgcccttccctccataaccttatgacggcacgataatcatccggtgtcgaatttctcgtgacatgaagcgatggttctttcatatgaaaagccgcctcattgatttccagcgtcccattgaacatgccgacaaatacaatttcccctccgtgggcaagccatgtaaaagcctgttccatggacgccttgttagccgtggtatcaatgactccatggtatccttcccggccggttttgtccatcatttcttttttttctgatttctcccccggatggaagacgggaaaatcgaatgagtgctttacaaattcccttcttgacggattaatatccgccagagtaacatccatccccagcgctctagcacaaactgcgcatgcagctccgattggacctgctccaaggatcagaattcggctgccctctgccaggtgcattctcgatacggcatgatgtccgatcgtcagaggttcaattattgctgcctcatcaacctgatccgggaacggatttttcagaagatgccgttcaggcagggacatatattcctgaagccctccgtctttatgtactccatatagctctagcgaggtacagcaattagtctttcccgctttacacgcgatacaggtattgcacggtatacatggcattacacatacgctgtctccctttcttaactgtacggattctcctgcatcttccacgacagccgatatctcatgaccgatgaccctgggaaacgtgaacatcggctgatttcctttgatagcatggatatctgagccacagatgctgaccgcctttatctttatcagaacttcaccgcactccctctcgggaatatttctctccccataagtaaaatccttcgcacccttcagtgtcaatgcctgcatttcaacacccctttcctatttgatttttactcattttaactttccggactgctttctattttgtcagataaccgccgtccacaggaatcgtaacaccattgatataatcggaagcggggctggctaaaagtacggcaacacctttgaaatcttccggtgtgccccagtctccctgtgggattctggcttttaccgactcatttctctgtggatccgcccgcagcggggccgataaatttgtcttaatccatccgggtgctattgcattgacattgattcccttatctccccactcgcttgccaatactttggttaatcccgccactgcatgcttgcttgccgtgtaggctgccgtattaaaaccgcccagataagacatcatggaagcgatattgataatcttccctcccgtcccctggcgcaggaactgtctggcagccagctgagaaaggaaaaatactgtcttcgtattgagctgcatcacatcatcccatgtcgtttcgctgtaattaatagccgcttcgcggggacaaataccggaattattaacgagtatgtccagacgcccgaacttccgcaaaacatcctgcattagcaaagataagttttccatctttgacaaatctcttcggactgccaaaaatgtgccaccaagcgattttacatattcctccagctcatccggccggtgggtatgatacacacaggcaacggacgctcccgcctccgctaatccacgggcaatcccaaggccgattcccgtacctccgccggtgatgagtgccacctttcccttcaaactgaactcttctaaaatcatagcgctcctttcttttgtctttattgttttattatctccgcaaatagttttattgtataaaactatgttttatatactaaaataattataatattttcagcccaagaataacaatagcaaatactgacaaaatataaataaaataattatgcaactagcacaataatcattttgtttaaatattatcagacttttcatcacttaatttgttttactcagtaaaattaaaataataattactgtctatatgttttctattcaattgtaaagaatcagtttgcgggattctccgcctgcggcaggtcgcagcgaaattttccttccgccgcagtacactcctccgcgagtgcggtttttatttgacgggtgagttttcctgttaaacgataacctgcacgctctgcgcacaggtcaccgtcctcaatattaaaggcctccggcgccatgaaacatggtgccggaggcctttaatattctttgctattctatcattatttctgcatctcgagtacatctgcaaatgcctggatagctgtgcttgcctgaccgaagtcacgcatctgctgatcgatacccagtttgatatgcggaatacctgcattatttaatgccttctttaagtatggatactccatttcctccgggtcacagaactgctgcatgaacagtaccagtccctgagcgccgctttcctttaccatgttggcaatgaattcgccgcggcggttctctgtagattttggatcatacagaagaacgtcatagtccatattggcaaactgttttgccagtgccattaatgcatctgcctcatcctccggagcgtctacacggaaggaacggctctcatggccaacgtcgtctgcggcgatggcaatgttgttctcttcaaagatttcaagaagctttggattgtcacagataataccggatgtaacaaccttggttccctgccagtcacagacaggaagtttctcaagctctgcgttcaattcttccagcttctctatgtattccggtttctccataaagaagaaggatttcaatactgcagaacgcttggttggtgtaatgacatcgcagtgtgcgcttgccagttccacgaatttacggcgggccgcacggctcttattgtatactttgatggcatcctgaatcgcctcgtctgtaatctctttgccggcaactttttccagttctttcttaacatttgtatactggtcaacgctgaactgaagaccaaaatcttcaaaacggttctgcggctgagcaaggaagataactgccatcttatctcccatagcaacacggaagttctggctcattgggcgcagtgtatcacagatggttggagtaatgattccgtccagctgatccattgtgccgtctaacagcatctccagagcaagctgtgcgatagtgcagtagaaagttgcacagtattctttagcacggctgatggtcttgttattggaaccccagattcccatgggcaccataccggcggcataaacaagctcttccggtgcgtaatacggcagaacgccgattactttcttaccctgagctttatattcagcaagctgctgttttggagtggcagcctttactttaaattcatccaataatgcgttgatactcatcgttactttgcctcctttgcctgcttatttgcttccattgcctccacaaggccctgtactcgggtctcatactgagcggcattgaagttacgcgggtcagcctggtcaccgtcgaaacctgcgcatggaacacccagatcttcagtgaaacggcgctgcatctcagccatataaccgctccacggtttacagcttctgttataatgaacaagaacgccatctaccttattgtcacggcagataccttcacgccagtcaacaccctgttcgatgcagacggagttcggagctttgtagtaagcgcgggccatctcatcgatgttgttataaacaaaaccgaaagctggtgcatatacaacggcagtaacgttgacgccatgctctttcagaggtttgaacaggttaggcagcttcggccagcaaggaataccctcgaacataacacggtatttctccggaaacggagttgtcgtctcacccttcttaactgtctcttccagatcgtctgccagaagctcaaatgcctcagcagcttccactctggcacgtgcagttacgacgtcagccatatggttgaacaggtcgaaaccgctgtatggagccggtttatactgaagataatcgcaaacctttaaccatgcctgtgcggtacggttagcattggaacaggctttttcaaacttcttctcgtcaaatttcttgcctgtgagttcttctaactgcttaattgccttatcgaactgagcgcgtacatattttacgttatcgtcatgaacatctaccgtattgttatacggaatatcaatcatgatcagcggtacgttgcacatacgtgcaatgttctcataccatttggtcatacagttgcagatattgttacagcagagaacgaagtccggctgcggaatacgcatctgacggattggagagattgcctccagacgtctttctttctccgggccgtccggaagagcttcaatctcaagcagattgtccagtacaagataaggagtctgtgtctttggatctttctttggtttaccggttgcttcgtcgattaccacattgccttctgcgtcttttaacggtttgcctgtagcagggtcgatgatgtattcaccggtttcagcatcatatttgcgtgatacacgcacaccggctgcataagccaggctgatacgggcatatccgcagatatcgttgtcataaccaagatcctcagcggcctggcacatcatctcaccgtaacggttcgcagcgatgccggcagcctggttctccggatacataacattcagatcaaaagctgctgcaagctcacaagggaacttggatgaggaccagccgactaactcgcctcttgctttggcctcgcgcgcatctttgtggacgtcatcaacgaccttgcgaagtgcgagaacgccaggactaacttgttttgccataataattatcctccattctttctatgaattgctttgacggcggctggacgcctgccatgcaagcagggcggcgccaagcgcgccattatactgtgtcagcggggaagtcttgatcggacatcccagctcatcctgaagcgccttcacaacgccttcattctgagccactccgccggtcataacgacatccggtaccacaccgatacggtgggcaagccctgtgacacgatgagccaccgagcgatggattccgtcgataatgtcacacttatcggttcccatcgccaactggcttataacctcactctcggcgaaaacggtacaggtggaactgattcccactttcttccgggacatggcgccgagccttcccagatcttcaacctttacttccaggacacgcgccataacatccaggaaccgtcccgttcctgccgcgcacttgtcattcatctggaaattggtcattgctccattatctatatgcaaaacttttacgtcctgtccaccaatatcaatgacagtgtggacatttggaaacagaaaagttgcgcccttggcatggcaggaaagttcgctcatctgtttatcggcaataccatccatcaaagaggtacggccatagccggttgccagcgtatatgccatgtcttccttcttcatgcctgcctcatttagcacggcttcaatcgcgcgctgcggtccgctggtacctgcgcctacatctatcagtgatttggccacaatctctttgccatcttttaaaacgatgcacttggaggctgtggaaccgacgtcgatacctaaagtataaattccgctcatagttatttatgtctcctccgttaactgagtgttggggtggttgggtaggttgaaaacttgaagcaaagatatgtccttgcagtgctgctcgattccgctttgctacatctcgctcacgggcaggcgccctatgaaaaaagacgaattaaattttcttatgtgcgagcacaacgtaaaatttccggtcgcttcccaccactttgcagtgctgctcgattccgctttgctacatctcgctcacgggcaggcgccctatgaaaaaagacgaattaaatttttcttatgtgcgagcacaacgtaaaatttaattcgtcttttttcgcactgctctttgcttacgtggacattataccacacccacccctaaaagtcgctggaaaatgtttaaaacgctataaaattattgataagactgttattaaaaaacctttatctgcctggacatacagataaatcgagcaaaggttccagcagcctctgcccgatttatctgaaaagtctcagacttttttactatctactatcgtactatcatctatcaattgttttatttacttggcgttttttaactatacattcactttttaacagttacaacattcattatttaccaaatgtctcaaattcacgtgtgcttcttggtgtcagcatctgatgcatcgggcagattgactgcggattctgataagcagcctctgtaaatgcctggatgtatggacgcatctctgtcatgtcgacaatctcgtctaccatacctttttctgtacaatattttggacgggacttgtctgtgtacatctgaatcatatcgttcatcttgccgatgattggctgtaaatcttcgcctgcttttttcgctttaaccagttttctggagtacatagcgtttgcagcagtttcgcctggcattacatagtactcgcaagcacctgtaccaagagagaatacgttggtattgttgccctgtggaccgccgagtacatagtgagcagctgcacttgccttacggattgtgatctctaaggacggcagtttggagttttcgatggagtagatcagggactgacctaaaccaagaagctcagctttctcagcctcgtcgcctacgtcgataccggttgtatcctgtaaccagattaacggaatacggtcacgggcacaaagtgtaacgaactcgttcatcttgataagaccctgacggtataactttccaccgatacctacagaattctgtttgtactccggatagttcatcagcagaccctgtacgttagcgataacgcctactaagagaccgttaacctttgcaagacctgttaccatctccggaccgtagcccttcttgtactcggagaactcactgttgtcgaacagacgggcaattacttcgtaaatgtcgtatggacgtttctggttcatcgggatgatgctgtacagatcctcagccggaagctgcggagcctttggtgtatcaacgcggaagaactctaagttgtatgcaggcaggtagctgatgtatttcttaataccatcgattacgcctaagtcgttctggtatacttcacggaagaatcctgtctcgtcatagtggatcggaacagatcccggtgccggaactttcagcttgctgttttcgatctgagcggcaataatctgctctgctgcttcatcatcaatgtatcccttcggattcataccggataagataccggctccgccgactgccatgttggcatcctgatgtgcaatcagaatcgttggggaaatgctgtggtatccgccgccggccgggttggttccgtagattcctacgattaccggaatacctaactggtttaattcagaattgcggaagaacggtgtaccgccgccgcgtctgtttggatataccttgtcctggttcgggaattctacaccggagcagttcagcaggtaaattaacggaagatgcatcatcttagcagcgtctgagcagcgaatcagattctctgcctgtcctggtacccatgcgccggccatcttcttgttatcggaagctacaatataaacccattttccatctacacggccaagaccgttcacgatgtttgttgtgccgaatttgttgttctcaggattgaaaaggctgtttaacgggcaccatgtacctggatcgattaatgcgttgatacgctgcattgcagataactgtccacgctcatttaacttctcttcagaagtaataccggcatcaagagcttttttaatagactcatggatgtcgctttcaacagctttgatctcctgctcattttccggatttggattaaccagctctttgccgattgtaggcatgttctggaaatatcctggcattgaatacatattcatgtcttcatttctcctattctataattgctcaactattgttataccgctgcggaagttttcggccgccgcagcgtatgtaggatctttatgtttacagtaaattagttagccggctcttccttcggaacctggataaatgcctggccgggatcgatctcctcacggatcatgcggataacttccggtgccggtgcatccagcttcactgctctggaaacgtcgatatcgaatcctgtattctcgataacgtcttccggtgaagatgtctcatagtagcctgcaaggtacattctctttgtcttctcgtcaaatttgaggataccgcggtcggtaacaactgcctgaggtccacggttgcccggaaggccgagtctctcgcgtccgccaggtccgtcaatccatcccgggcttgtaacgtagtcgatcttctgcatgaaacggcgtttttcgtgctgaatcatgatgattgtgttagagaaggttgcgattgcgtttgcaccgccggagcctgtgaaacgagtcttcggagcgtgatagtcaccgatacaggtggagttcacgtttccgtatgggtcgatctgtgcgccgccgatgaaagcgatcagtctgtctgtgtcatgcagccactcatttgcctcaaatccgataaaacggatattaggccactggcatccgcaatgagccataaaacgaaggtcacctacggaacgcggaacctcgattggtgagcagtccatcagtccgctctcaacgatcaggttgcatttcggtgcgaataaacgttttgcaacggatgcaccgattaacggaagtccggtacctacgattgcaatattgtcatttgtgatctgctgggcaagtgtaattgcctgcatttctttgtttgtatactttgtgtagtcagccatgattaatcctccttgctcacatctgtagaatatccatatccatcagatactttcaatttaaggagacggttaataccgatcttctcaagaaattctgcattatctttgatatcataaacatactcatttaagaatgccttgaaatcttcttccgtcttgctggctgaaccatacgctttcaggaaagcgttatcatagtcataataaccatagcactgtgtcgggaatgcaccgtaaggaacctcgcaaactgcgtcaactgcaaagcaaggaatctttgtcaatgtaggatctctgcggatcacgtcgttgcttaccagttcttcacatgtaacaataactttcttggcagctacaacgatatcaatatcatggaactcatcgcccagaaggatacaggttccgtccggagatgccttctgaacatggatgatagcggtatccagctcaggaacaggaagtgctactaccttctcacccggtttgaatgggttctcaacatatacgaacttgtcgtcggaaagtttgtcaattgtctgacgaacttccttgctgattccccactcgtctaccagtccggatccgatcataaagcgcactggtaaaaatggaagtcctaaggaagcggcatgaagcatgaacatgatagcatcctgagagtaatcctcatagatcagctcgcctgcttcgattttcttacggaagcggcgggatacattggttacaccggaatcagccgtatagcagttgatatatgcttttacacgatcctcaccaattaacatatcccagtcagaaccggcaggaccggcccatgcaataaaatcttttttgccctgacgaaggatctcgcggactgctgccatcggttttttgttggttgtaaaaccaccgaaggagatcgaatcgccgtcttctacatacttagcaaccgcctcttgtaatgtacacactttattactcacaataaagcctccttttattaaaattttcaataactaccgtaaattatttaaaaatcagcatgaagaaaccggctgccacagcagaaccgataacacctgccacgtttggtcccatcgcgtgcatcagaaggaagttcgtcgggttctctttggaaccaactgtctgagatacacgtgctgccataggaacggcagaaacacctgcggaaccgataagaggattgatttttcctcctgttaccacacagagaagcttacctaacaggacaccgcccactgttgagaaacagaatgccataagtcccatggcgatgatagcgattgtctgtacacgaaggaagatatctccgtttgccgtagcacctactgttgtgccgagcatgatggttacgatgttacaaagcgcattctgtgccgtgtcggaaagacgctcaacaacgccggactcacggaacaggttaccaagcatcagcatacccagaagcggggctaccgacggaagaagcagagaacagaacagtactacgaatacagggaatactactttctctactttgcttaccttgcggagctgtttcataacaatggatctctcttttttcgtggtaagcagtttcataatcggcggctgaatcattggaatcagggccatataggaatatgcggcaaccgcgattggcgctaccagatccggtgccaggttgttggcaatatagatagctgtagggccgtcagcgcctccgatgataccgatggctgctgcttcacctactgtgaagaggccggttgcattagccagcatgaatgcgatgtagataccgaactgtgccgcagcaccgagcagtaagcttatcgggttcgcaatcaaaggtccgaagtctgtcatcgctcctacacagaggaagataagacaggggaataagctggacttaactccgccgtacatgatacgaagaacaccctgggtgtaccatggttcggattctttcattaaatctgccagaggcaggtttgcaagaaacataccaaatgcgattggaagcagaagaagcggctcatactgctttttaatcgcaaaatataaaaggataaaggaaatagcaaacattaccaggtttttccaggtaagtgccgcaaaaccggactgagccagcatttcccccatgatttcaaaaaagttcattactctacctcctagttaaggacaaccatggcagctccagtgtctacaggatctcctgccttaacaagaatctggcttactgtgccgtctgccggtgcaacaatttctgtttccatcttcatagcttccataatcgctactacatcgccgtatttaactgcctgtcctgctgttaccttcacatccagaactttacccggcattggtgcctctaccgttgtggcgcctgctgctggtgctgctgccggagccggtgctgctacaggtgccggtgctgcagccggggctggtgctgctgcaggtgccggagctgccggtctctgtaccggtgccgtgcttgccagtgctggtgccttaggagcagccacaccgttgcggtccagagatttgtagccttctactctctctacttcaacttcatatcttttgccattgatcgtagcaatatatttcataatctttttacatcctttcgattgctttcatgaatcctatctttttagttcagaacaaccattgcggttccggtctccacagcatctcctgcttttacaaggatctgtgcaaccgtaccgtctgccggtgcaacgatttcagtttccatcttcatagcttccattgtgatgacaacctggccgaatttaacagcctggcctgctgccacttttacgtcaagtactttacctggcattggagcttctactgttgtgccgcctgctgcaggtgccggagctggagcagccggagctggcgctggagcaggtgctgctgctactggagcaggtgctgccgccggtgcaggtgctgctgccggtgctgtaatcggagctgccggtgcaggtgctgcctcaccatatcttgggattggctcatattcgccaattctttcaagttctacatcgtactgttttccattgagggtagccgtatacttcataactgctgtaaccttcctttcgatttccttccattcctgatgactatcagagttcctttacgtttacaatcttaaactgatcagccggtaattcaagatccataccaatcgtagccataagtaccgccagcgtctctttatcggcttcatccgatacaaccggagcagcggccggggccggcttctgagctccgtccttgataatcgagcgcaggattttagatattaaaatgattgccagagccaacgtaaccagagtgatgaacactactgaaattcccagcagggatacgatgaccgactgcccaaaaggcattgtagcttcagtccacatacgtgcattgcacctcctttttagcagatctcataagagaccttcattattcgttttgcattcctttgtgaaaaattatattattaaaataacctcaaacaaaattccgcattatggaatgcattccatttttaaaagcccaaaaaatataaagggtgtcagccctttgtgaaacttgcagtacgcttttaatcacggcaagctcactatggctaaattataacagtaacccccttgaatgtcaaccggggctttcataaaatatgcacaaaaaaacacctcgcgaattagggaaaacctctgataaaatcaaggtttttcgaccttttacagcacgattttatatgtttattatcattattatactccctcttcctacaattcatattatcgttccgtttattccgaaacccacccatttctttttcactttcttaacaatacgacttttttctgtaattttctccacaattttcccttcttacaaatccactgcttgtctcacgttaagcgcgggggcggaccggttcctccatgcgcacaggtcaccgccttcaattaaagaaagagagtggttagcactctctttctaccttattataattataactttattttacccggctaatcattttcaccggattctatacttaattcttattttgcgattttaaacgaactcttcaatgatacaatccggttaaatacaggagcccccggagcactgtctttgcagtccacacagaaatatccgtttctcacaaactggaagctgtcaaacgcctttgcatctttcaggcccggctccatatagcattccctgagtatggtgagtgactttggattaaggtttaaggaaccatcggcgttgagctttcccttttcctcgtcaatcagattttcataaagacggcactctgctttcaaggccgtcggtacagccacccaatgaatcgttcccttcacttttcttgcattaaatccggaaccgctctttgtctccggatcgtaggtacaatggacaaccgtcacattgccgttctcatccttctcaaagccggtgcaggttacgaagtatgcattcataagacggacttcatttccagggaacaggcggaaatatttctttggaggttcttccatgaaatcttctctttctatataaagttcacggctgaacggaagctttctggaacccagcgcttcattctccaggttgtttggtgcatccaattcctctatctgtccctccggataattatcgatcaccagtttaatcggatccaggattgccatgacccttgcctttgataatttcaaatcctcgcgcaggcaatattccagcatcgcactgtcaatggagttgtcggccttggatactccggccagctctacgaatttacggagcgactgcggcgtaaaccctcttctcctcagtgcagcgattgtgacaagacgcggatcatcccatccgtctaccactccgtcttcaaccagctttttgatgtaacgtttgcctgtaactacattggtcagatacatttttgcaaattcaatctgacgcggcggattttcaaattcacattcttttactacccagtcgtaaagaggacggtgatcctcaaattccagggtacagatggagtgtgtgatatgctctatcgcatcctcaatcgggtgtgcaaaatcatacatcggataaatgcaccacttatcgcctgtattgtgatggctcatatgggcaactctgtaaattaccggatccctcatgttaatattcggggatgccatatcaatctttgccctcaggaccttctctccgtctttatagagtccgttcttcatgttttcgaacagctccaggttctcctccacgcttctgctgcggtatgggctctccttgccggggttattaaaatcgcctctgtactcgcggatctcatcagccgttaaatcgcatacgaatgcttttccctttttaataagaagaactgcacagtcatacatagtctggaaataatcagaagcaaagaacagcctgtcctcaaagtcagcgccgagccatttcacatcctcaatgatggactctacaaactctgtcttctctttcgtcggatttgtatcgtcaaaacgcaggttgaatttaccattatactcttctgccagtccggaattcaaaataatggacttggcatgaccaatatgaagatatccgttgggttccggtgggaatctggtttggacatggctataaacaccctctgccagatctttatctatctctcgctcgataaagttcttggatacaacctcctccttatctcccgtttcagctattacattcttattctcttccataagcttccctccgtttactgtttctctatcgtatagaatcatacttccgccgtctttaaaagccgcagcgtatgatttttactgctttcagacaaatatcttctgatcatagcaaatatttcctaatatcataacacattttaagaaattggaaaagcagtaatccataaaaactttgcatttcactgcaaatccgcttatccatgtatttcagttaatacttgcatttttcccataatcgggatacaatattccataatgtggttagtttttcctaacttttgtcagagaataaattaccgcatttgtgggcatttataacttcaaacaatccaatttcgccaggtaaaggaggcattatgagaattgacaaacgtaaaatagcactgatcgggacaggaatggtgggaatgagctatgcttatgccctgctcaaccagaatgtctgcgatgagcttgttttaattgacgtgaataaagaaagagccatcggagaagccatggatctgaaccatggacttgccttttccggttccaacatgaaaatctatgcaggcagatatgacgactgcagtgacgccgatattgcagttatttgcgccggtgtagcgcagaagccaggtgaaagccgtctgaatcttctaaaaagaaatacggaagtctttaaatccattatcgatccggtgacatcatccggctttaacgggatcttcctggttgccaccaatcctgttgatataatgacacgtatcacctgtacactatccggcttcaatccgcggcgcgtcctgggtaccggcacagcgctcgatacggcaagactccggtatctgttgggtgaatatctgaaggtggacccccgcaatatccacgcttatgtcatgggagaacacggagatacggaattcgtcccctggagccaggctatggttgccacaaaatctatcacagagctgtgcgaagaatcccatggttccatctgcgcccaggagctggaacagatatccgaggaggtccgcacagcggcatataaaattatcgaggccaaaaacgccacctactatggcataggaatggccctgacgagaatcaccaaagctattctcgggaacgaacacagtgttctcactgtttccgccatgctgagaggggaatatgggcagtccggcatctttacaggcgtgccatgcattataaaccagaacggagtccagagagtgctgcctctgtcgctgagcgaggaggagagtgaaaagctggagcagtcttgtcagattctgaagagaagttatgaggaattggaaatttaactgaggtttggaggacgcgtccggaacggaccatgtccggtgtggtgagggggctggctgactctttcgtccccgtgggaggttgggcgtggagggggaagtaggcggaggttttcgcggcaccgggcatggtccgttccgggcgctgattatctccaaccttaaatggggagagccttgtcgcgaccactacgtgtttccggcaggctgatatcaaaccttccgcaattctttcataagggcgccttgaaggcatatcgtatttaccgcacacggaagcactgagtggcctcgacaaggtccgcccccgcacttaacacgtgagacattcagcggccgcaggccagtggacggggccgatacacccggcagagtctttcgacccggagaaaacctggctttggggcggaggggaagataaagtctgcggatgccgcctaaatccatcgctgattggcgaggtcttttcgagcctagcagcgcgatgcatttcacagagcgggagcgtgctccgcagactttatttcgcccgcagccccataccacgacaatcttccccgggacgaaagactcatatacacatcccaccaccccgtccgctggccgtaccggcggcgtcctcacctgcttaactacatctccatcatgccaaagctccccaagggccctgcactcttctgccgcagtgtcgtccggcgctccgttggccagtaccggtccggctgccatcgtgcagccaagcttgctgcagtcatcttcccagattctcatccactcaccgtcccccagccgtaagaaccgaacaatcctatccgttttccgccgagttttgtcttcacctcttcaaacatcggttcaaactccgattcctccagctgctccgctcccatggaagggcagccaaatgcgatggccggatactccccggccttgtctgccgaaaactcggccgaagtaaagacatctacctcagccccggctgctttggcgccttccgtcacataatatgccatagcctcagtatttcccgtaccactccaatatacaactgcaactttactcataatctcttccatcctttcaataattggtatttttgtttgataagatttaacatctattagacagctgcgaggagctgaataaccggtattccattttcaaatcggttcatacacatcctgatacagtttctgtatctgtcaaaacggtgtctggcctctctcggatctccgtaagtcttccaaaatccgcagcaggtataatttctgcctctgttttcaatgaaaccaatcacatcttctaacggatatcccagaaaaacgccgatttcatggggaaaatccttttccgcacacagcctgtttgataactgctgcaaaatgaacccgcagctccccggcatcatgtagcccttctgtttcaggaaagccacggtctcaggatccgccagaatctgctccacccacctcttgcgatatacatatacgaggacagactctgattcaggacattctttgatgattttcactgatattccgtgctgcgacagttctttgtcccagtatgcaatttctctccggactgcgtctccgccacccgcacaatagcggaataaattcgccggtttaatacccgaaagagtaggggcacattgctctacaagcattttctcaaaacatctgctcatcttttatctcttcctttcctgacaaatcttttatatttacacatttcccagggaaccatgctccggattagaacgtttcccggatcgtaaagttagttcaaactaactacataggcaaaaaaacaggtttttctatgtccaagccatataaaaccttctttaactgaatattgcagctaacgacaatcgaaactgaacgacaggtatttacagccattcctatcaattcagcatatagttagttttaactaacctatataaaactttatcatattctatctattctgtcaacaaaatattttaacgctgtttccgttagaaagtcttaaccctttttataaatcctttatcttctggtcaaactttcgacatatatttcctgtatagtaatagtcagacaggtcactaaccttttacataaactttttcatactcatgccggcgggagcaatcctgccggcctccccctttccatattcatattatccgtatccgctcatataatatacaaattcccaacaggttccgttcatgcagaccgtctctaacaataccctgaaacaaactttgtactaccgtgatattccggttttaatatacaatatacagtatcctgcatttaattccacctgcagcgagaaggcggcagaggccgtcagcgaaaattacgccgcacttgcaaggagtaaagaggaatactgcaaagccgtattatacccgcaagccgtcgaatcagccaggtatatccagtcaaattatcctccgttccacagctacgaatttgatatgacttacaatataaccttaaatatgggatgccttaccagcctgtataccgagcagtattcctacatgggcggtgcacacggctcaaccgtccggcaatccgacacctgggatttcactacggggaacaaggtgcagcttggagatttctatccccatgaccgtctgttcagggagaaaatccaacgatggatcgaacagcaggtatccataagactaaaaacggagcctgccacatatttcgatgattatgcaaagctcatacagaacacctttaatccggacagcttttatctttccccaggcggcattgtgatatattttcagcaatatgacattgcgccctatgccacagggttacccgaatttgttttgcccgttccgccaggctttgaaccgctttttacaaggaaataggtccggacataccgaaaagcagatcaaaaaacggaaagccttgatattacaaggttttccgctatcttttattgatgaggcatcggggattcgaaccccggacaacttgattaaaagtcaagtgctctaccgactgagctaataccccgtatttaactgggctagttggatttgaaccaacgaatgcaggagtcaaagtcctgtgccttaccgcttggcgatagcccatcagcaaactcccataaagggaaggtggataaagggattcgaacccttggcctccagagccacaatctggcgcgctaaccaactgcgctatacccaccatagggaatctaaatcgtcgatttagattcgacgagcctgaagggattcgaacccccgacccacggcttagaaggccgttgctctatccaactgagctacagactcatattcactttgcgatttggccaaacatttggcaatctaactttctccgttttcggctgttctgccaacctggcatatcttgctgcgtttttgacagcaaaagtagtataaactaaaactgtctgactgtcaagcacaatttgaagaattttggtaacaactgtagaaaaacgcatcaacgggtcatagtataccacataacctgtaacaccgcaagtattttcttccattcaaaccatattttttcattcatttgccgtatacctgctgccactgccatttcgcacggtcagcgcctcaattacgcagaccggcggggcttagaatgcagccgccctctgcatgcccgccggcagatttctacatctcctcatacggcataagctctgtcaaataatgtttttcccggagcgcctcttcaatttcatcaagaatttcttcctgctccgccgacacgcggtgaaaatgatatcccgaagtcacattcatcaacggagcagacttgcccgattcaatgtcgttcataaatatttgtatatcacggcggttcttgatattcagaggagccgttacttttccgtatacacggtggttaatcatcacgtccagaacgcagccgcccaaatccacaattgtttttaattcatcctctgtctcatcattgttgtggcatactttgaaaagtcttactgcctggctggcctcattcagaatatatcccctggccgtggcgacaatcggatatccttccgtgcgaagaagggcgatatcctgcaccaccacctgccggcttacgcccgtctctctccccagcgctccgccggacaggggatgagaggtctgcctcatcagtgccagaatctttttgcgtctctgcgttccggtcagagcgctctctgttccggccgcgctctcttccttattattcaatctcatacccattccggcgttcctgtcctttccagtttatactctgcctttattcactgctgtgagtaacaattcacgccacatagccacaacatgccgcagcataacggccgtaatcagcggaggttcaaaatttctattccaattttaatacattgccgccgtccatgcaactacaatcaccgcatttctgccggcacatcaattagagcgttactgttcacccgcagcaaaatgcggcatgctgtaaacaaaaacgccttgcaggatactgccgtgtaagcagcatcattagagccgtcactccacggcacgcagatgtttcaggctgatgtccagaattggggcagaatgagtcagagcgccgcttgaaacataatccacgccagtttccgtaattgccctgatattttccctcgttatattacccgaacattccgtttccgcacggccatcgattagtttgactgcctccgccatctgtccgggcgtcatgttgtcaagcataatgatgtcggctcccgcttccacagcctcccggaccatagaaagattttccgtttccacttcaatccggcgcacaaagggtgcatatgcctttgcagccgctattgcctccttcacgcctcctgcagcgtcaatatgattgtctttcagcagaatcccgtcggaaagattatatctgtgattattccccccgccaaccctgactgcatatttttcaaatatcctcatgcagggcgttgtctttctggtatccagaagttttgtcctggtcccctccaaaagcttcacaaccgtattcgtataggttgcaataccgctcatacgctggagatagttgagggctgttctttcccccgacaaaagaacccggatatctccggtcacggtggcaagatgccggcctttttccactctgtctccatctttcacatcaaaggttaccttggtccggggatccagcagcaaaaacactctctcaaaaattggaagtccggctataattccgtcctctttgcagattaactgcacttccccttttttgtattccggcatcacggaattagtcgttacatcctcactgttaatatcctcctccaaagcaagacggatatatttatcagcagcaagctgcatggtaattggattcatatttgatactccctttccggccctctgccatactggctgcggccctttgtgcaaatacaagactctccagcagactgttgctggccaggcggttctttccatggacaccgttacagctggtctcccccactgcgtaaaggtggtccatcgtggttcttgaattacagtccacatgaatccccccataaaatagtgctgggccgggacaaccggtatcggttcttttgtgatgtcgtagccttcttccagacaccttctgtaaatattcgggaaatggttccgaatctgagcttcacccaccggctcgaatgagagccatacatggcggctgccctcccgctccatctctgcatgtattgcttttgtgactacatccctggggagcagttcatctacaaaacgctccctcttccattcagcagtacggccccttctcccctggcagattccgatatcagaaagcttctgcccggcttctcactgtaaaggctggtcggatggatctgtacataatccatgttttcaagctccacaccgtatttttttgcgattgccagagcatctcctgtaagacaggggaaattggttgaatgctcgtagaggccgccaatccctcccgtagccataacggtatccctggtatgtatatgaagaatctctcctttttccgtctttgcaatcatgccggtgcaggcgcctcccgagacaagaatatcagtcatagccgtaaattccataaccgtcacgttcggcagttccctgacccgcttttgcagtaccgtggtgatttcttttcccgtaatatctttgtggaaacatattctcggcctcgaatgcgctccctcccgagtgtaattcaggctgccgtccggattcatgtcaaaacgtactcccagtttcaggagatgttctatcactccgcggctggaacgtatcataatttcaacgctttctttcctgttctcgtaatgtccggctttcatcgtatcctcaaagtagggttcataatcctcttcatcccgcattacacagatgccgccctgggccagcatagaatcgcagttttcaattccctctttagaaagcatcagtattttctgatcctccggcaggctgagggccgtataaagacccgctactccgcagccggcaatcacaacatcgtaataaaggtttctcaccataattatgcccccttatcatctggccagttccagcattcgtgtcagtgtggcttttgcagggcggcaaggtcttttggcacttcggccctgttgactcctgtttttaatacttcaataatcttatccagtgtaatctttttcatatcggtacaaatcggctcggtagccggaaaataaaatatcttccccgggtttttctgttccagctcatagcggactccgcactctgtcgctattataaattcttttgattcgctcgatgatgcataatttattattcctgttgtggaaccggtataatcagctttctccaatagcgcaccattacattccggatgagcgaggactttggcatccgggtgttcacatttaaggctttcgatttccgacgcccgcatctgttcatgaaccgggcagaacccatttaccgtcattacattcttctccggtacctgctccgctacaaagcggcccagattcttgtccgggataaataaaatatttttattcggcagattttttactatctgcactgcattggctgaagtaacgcacacatctgcccaggatttgatctcggccgtggagttgatataacagactacagccaaatccgggtactccctccttgcctgctccacctcttcccttctgaccatatgggccatgggacaatccgccccggcatcaggcatcagcaccgttttgtccgggctgagcagttttccgctctccccatgaatgaaacgccgcaaaacacaagtgtcttgttgggaagaccggctgcggccttgctcaggttaaaagaatcgcccacataatcggcaatttcctgcacttccggctccacatagtaatgagccaggatcactgcatccttctctttttttaactggtttatctcttcctgttttgtcataccatcctctattctgccgcttttcaaacggcctttcctgcttttttcgtccatttccaggcagacgccggcggaaccaaccgcactcgcaacagtatagcacatgatttttcatatgacaagacacctgttaataaatctgcaaactcatgtaacagttcgctgctgttcacaggggaatgttccgcgaggtgttttcgtgtgtatttcacacgaaaatcccgagttatgcggcgcgaaacggagggcatacggccggttatcacggcgtatgcccctaggattaaaaataatgattatcaaacatgaaccgatccccccactcggcggaacagtaccctgcataaattacaagcagcgtttcttttgccagacggtaatcggattccggttttctacccgtagcggcgcactccacaaaatcctgaagctgccctgtatacccccggagcatctcttcctgtaccagggctttctgataccccagattccggccgcttttttccatgacctcttcctcttcgattcccgtctcactgccccagtaaacttccagcagatcattgggcgtcatattgcactgataaacagaatccgtcccataaacggtcatgcagtttattattccgccaagaaagatgtcacccgcagttacggatgcttttgacccgtcggaaaatgtgataatcaactggctccagtcttcgacatccaccggcgcagaggatatctcccctctctcccctgttttctttgtcaaggatgacgtatcacatagcaccgatgtaattccgtatacttctcctcttgcctccatttccttccgtttcagaaacagaaccgctgccacgggatgggttccctgacgtatcagcgcccctcctccgttataacaccaatatgcagcatgttctgcgtgagaacctttgtgtccggttctggcttctattgatagcagctttgtgccctttttgacaaccagctcagccattcttataaaagacgggctgtaaatccagttttcagcatagaagaactggcagccggaatttttaactaccagctccaatcggttcagttcttccctgacagcattcagcattatgtctttcggcacatttcctgtttcgtcttttttgacgctgctgttcccaaaataaccggtaaccggtttttcacaaattacatgctttccggctttcagcgctgcttctgccattttataatgaagcgacggaggagtggctatgtcaatgatttcaatctcactgtcttccagcatctcttcaaagcaggccgttgtctgttcaaagccgaactgagcggcaaattcttcccgatccgtatccagagaacagacggttttcatgcggcagttaataccgcagagcttccggtagcttttagcgtgcatggctcccgcccatcccgttccggccaggcctatcaccactgtttttatcattcaggcacctccccagccttcgcattcatctcatccagaagcttccttgtaataagcatctcttcaagccccgcttccggacgccggcctgccagatattcttccagggaatgaatcaggaaatcgctgtaataaatatcactgtccgtactcatccgagtgcgttttaccgcttccccgaagatacgttcctcgaaacagccgtctcccagcgtgtaatacccattttttgtgataatattccaccgattatcccgcttctcttcctccatcgggaatgcataaccggtttccagggccaatgttgcaccgctagagagcctgctaagcgatgccccatagatttcgacatcatatctcgggtcgaagtgatagctgcttcccagcactcttccgtcctcagattcagtcagatacatcgccatatcaataaagtgcacacccagattggtcatacagcctcctccggccatttgtttttttaacatccacggcgatggcacttcgtagcgggacggcggccccgctataaaccggaaagacaggtgtaaaatctcctccggtctcactttttctttaaattcccgtatcagtaagctgtgcctccacacgaaggggattgcacaaaacactcctttcttttttgcctctttcaatacgcggtatacgtcgaaggcgccaagccccagaggcttttcaattgcaaacggaatctgcagacgaattaattcgagagccagcagcggcatctcataatggggtgcaaaggcaaatacgaaatccggcttctccctgcaaagaagctcccggtagtccgtataaacccggcagttcagtctgctgcctgcctgttccgcaatcgttccgtcgggatcgctgacagcggcaacatgcagcgattcccgctctaccccttccaggtagagcgggacatgccagtggctgactccgataaatgccaggtttaaatcctgtattttcttcatcctaatatttttccctcactttgattaacagatcgtagagttccttctgcccctcatctgccgatgccagaaaactgtcaattaccggctgaacagaggcaacaaacgcttccttatcaacctcatttatggcaacgcctttttcttccatttctttcatcgcgttctccattgcatcggaccagatttcgttattccatgcgtcggtaaatctttcccctgcatctttcatcgcagcctgattttcttctgaaagtttatcgaaccaggctttgcttacaaaggtgggatcaggaataataaactgctctgtcagagaatagtattttgccacttcttccattccattggccagaatgaccggagccgaattctcaagtccctcgattgtcccctgctgcagagccgtgtatacctcactccatgccatcggcgttgcggagccgcccatcgcgttgatggttccggctagaattgcatcctccattacacggattctgagtcctttcatatccgcaggtttctctatggcccgttttgtgtttaatacgcttctggaacccaggttgcaccaggagataatttcaaagccctgattccgtgcatccgcttccagaacagccctgacttccgggtcagtcagcgttccgattgcctgttctgcatctctccagagataaggcagggaaagcaccgaccataatgtactgtaattagacaaatccgttgccgcacactccgtcatctcaatcgttcccgtcctcagcccctccatggatggaatcttgtcccccagctgggaactgggatagaattccatcaccatcctgccttccgagcattctttaatcagctcgcccaaacggttggctccgtccgcctgtgtcccggtggccgggaacgtaacggaatactttactaccgtttgaggcttatccgcctgctcgcctgtctccacctttgccggtgcctgttcctccttcgtttcctgctccgccccggtctgtgcctgcgtcttagcatcttttgtctgaagacagccgctcagcgctgccgccgtcatgatcgcgctcatcgtaagcgccgccagctttttcatctttttcatgtacatttcctccgtttctttcacattttttcttccctttagtttctttatcttttttccaggcctgcgatgcattctctcaggtacccggccgatttcttcataccgaccgaagcatccgggatatcaccgggatgccaccgcctttcatactccagggacagccatccctcatatccatattctttgaccattgaaaggatagacggccagtcaagacagccctcgcccacaatcctggtcacaacgttgcgttcttcctctttcgggtgagagacatccgaagacacaaatctcctgtcctcccctttgaatgctaaatcctttacatgcatataatagattttctccgactgcaggggtatcgcctctctatagtcttcctgttccgtaaatgtcagattagcctgatcatagagaatccccactgacggatgatgaatctttcgggataccgcaatactttcggccgccgagaccgtcattgtattaaagtggttctcaattaccagctttatcccggcttttccggcctcatctcccagaattttcatgctgccgaccagattatcgagtttttcgcccgtcttgtcggattcacccgccgcaaaattaccgccgtatatccttatgtactccgcccccagatatccggcatagccgatgatccttttaattccttcaatctctctgatgcggaccgcctcgtccggatcgttaaaacgggagttatacggggtcaggcatataattctgattcccagcctttgcgaaagattacgtatttcctgcaaaaacgtttcaggacagttttccggtattccgctcctgtaaccatcctgtaccactatctccgctccatccagaccgatgcggtgaaaaagctttatcgcctccaaaaccgtatattccggagtccccattgtatggcctgcaatctgaaacatctcttacctccttgcggtataaatcagtcaagcgccggaagacctgctgcttttaaaatccggtgcatcaattcatgtgttttataggcatcctctgcacatgtcaacggcttttttcccgtcttcaggcagtcaaaaaaatgctcagtcgccggttcaaagcccagtttatcttctactcttgcccagcccatcgccagaggcgtcatgttcgtcgtatgagcctgttcaccatccactaccgtaacactgtccggtgcattcacatatacgctcctgttgtgtccatgcatctccatcgtctcaacccactgcccgatgaccggtctgccacgagtattcccactgtaccattttcaaactggagctgagccgtcaccagcgtctcataaaagggatccgtatatttggcacaggcatcaacttttatgcattccccactcagataccgcatcaagtctaccatgtgaattgcattttcgagtgtagcacgatactcggaggcaggacggtttttctgcgccacaatcacatccggagccagttctccatatgtttcctttgcttttttataaacaggagcaaatcgcctgttaaatccaaccatcagacattttcctgttttagcggaaaggtccgccacttcatccgcctctttcagagtcatggccagcggtttctcacagaaaacgtcaatccccccattcaggagccttttcacttgatcgggatgctcttttttgggagataatacaaaagcacagtccagccccagaccaatcagctcatccagtgtctctaccgcatgtacggccgcatatctctccttcgcctgctgcgcatgttccaggtgcttagccatcactccggtcagctccacatcctccctggccgacaataccggcagatgggcaatcctggcaatggcccccgtcccgattacgcccactcgaaatttcttttccataacacattacctcctaaactgcatatcccagcagctgcggcaggaatgtcacgaactgcggaatatatgtcacgatcatcaatacgattacttcagcaataatataaggcagaatccccctggaacctctctcgaccgagatacctgcaattttgcaggcaataaacaggcaggcccccattggaggggttcctgctccgattacaagattgagcaccatcacaacgccgaaatgaattgtactgatgccaagttccacagcaataggagccagaatcggagctaatatgattaccgccgcgcttccgtccatgaacatccccataaccagaagcagtatgtttactaatagaagaaaaatataaggagaacgggtaagtgacaaaaacagttctccgagtatctgtgacatttgaagggcgctgagcccgtagctgaatattttcgcacagcttataatcatcaggatcgtccccgacatggtggcggactgaagcagcatcggccacaaatcctttactttcaccgtcttcataataaaaatgctggcgaacagactatatacaactgctgccgcaccggcttccgtagcagtaaacactcccgtcataataccacccacgataatcatgggcattcccagaggaagaagtccttcactcaccactcttatcttatcttcccgcgccaccttctccgttcttctcgggaaatgctccttccgatccatcacggcgactgcaatcatcagcccaaagccgatcagaattcccggtacggcgcctcccataaagagcgcccctatcgacgcgttgacagtaacgccaaatacaaccatcataatacttggcggaataatcggtccgcaggtggatgaggaagcagtgatacccacggcttgttccggtgaatatccctcctttaccatcgccggaatcaggattcctccgatacatgatgtatccgcctgtgcggaacctgtaattccaccgaaaaacatgctcgctacaatattagcctgtcccagactggccgggagccggccaatcacaagcagggcaagtttaatcagtttatcggtaatacctcccctgttcataatttcaccggccagcacataaaaaggtattgccagcagaggagagtagccaatcccgttataaacagactgaggaataacaagccaggcctggggagtccccgttatacaggataaagctgccaaactacaggcgcctgcaaggcccagactgatatataccggaattcctatcaaaataaacacaaatacaagaataatgagccctataattacaacactgttcatggctgctcctttctcataattcctttggttcatgtaaaatccgtgttttcagtgtctttaaaaactcatagatggacagccccgctccaattggaagaaacatatagcagtatttgcgcggaattctgagcatcaccgtcttaagcgtgccggtcgtaatggtaaattcaaaggagctgagaaagaaaagaacaaggaaccccaggctgacgagactgacggccgtacgaaccactgtccttgctccggcaggcagacggtccacaaaactctgcagctccgtatggccgtccacccgtaccgccctggccgtcccaaacatggccatggataccattaaaatctggacgacctcatcactccacaatataccgctccttaacacatagcggaaaaatacatgggttactacaatacatacaattgccccgaaggaaacaacacaccctacatcctccaggacagctatccctctgtccaatgtttcaaagactcttttcaccggaaaatccctccttcttccatgcggcagaattcaatccctttaaaactgccctcttaattttactcctgatgaacaattgcagaaagcagaatgtattcgtttacattttttaccatttttttagggaaatccacatagattttccccttttccgctagttattattagtttatagtgtatatttagaccaaaaatgtatacgttttcatttgtatattttcatattatcatggccgatatgagaagtcaagttagattttatgtgtatttttacagtatttttcattattatttgtgaataatgcataatacaggaaatagtacatcgcatttttatcaaatgcatttaaactttcatatgactaccacgataattttaattgacaacccgaaaaaatactgctattcttgaaacatggaaggcgtttttatgataacgttttcattcctgttataacaagatttctttttgtaattctataattcaacagtaaggaggaattcctttggcaaccgtaaaagacgtagcaaaaaaggccggcgtatccatcgccaccgtttcaagagtaatccggaatgaggagattgtaaagccaaagacacgagagatcgttctaagcgctattaaagagcttaattatcagccaaatgctctggccaggcagctccgccagcaggaaacgaatacaattattgtgattgttcccgatataggcaatacttttttccatgagattcttctcgggattgaatctgaagccgaaaaatatggatatcaggtactgatcgtggatatgcacaataaatccgatatagaaagctactatctccacgcccttcagcaaagacaggtggacggagtcatctccctctccgccaatgtggcaaaaagcctgatggagcaggtggcgacctcctctcccatcgttgttgcctgtcagtacctcgacaactccaatattccgaatgtcacaatcgacaatatcggggctgccagaaccattgtagaatatcttattaaactcgggcacaaaagaattgcacatttgacaagccatccatcggccctgctctaccgggatcgcttcaacgggtatatttcagccctcgcaggccacaatataccaattgatttggagcttgtaaaatacggtgagtccaccattgcgagcggctatgatatgatgaattctcttctggaactttccaacccggttacggccgtatttgcggcaggggatgttatggcaatcggcgcactgaaggctctgaagactgctggactcaatgtacccggagattgctccgtagccggttttgacgatatcgagatatcctcaatattcgaaccggcgcttactacaatcagccagccaaaattcctgatgggtaagacctctttcaaaaaactgctgaagctgatgaggggcgaagccttaaacgcgcagcaggaaattcttgattacaagctggttattcgggaaagttgcggcgtaaagcctgacaaatagaaagaaggtgtattaaaacaatgaaatgcaacggtattgtagctctttctgccggagaaacgaagatgtgccgggtggatgttcctgagccgggtcgccatgaagtacaaatccgtatggtttccagcctggtgagcgcaggaacggagcgggcctgggtacttggacttgcaaatgccgttcccgattatccctatgttcccggctactgctgttccgggtatgttgaaaagatcggagacggagtaactggtttttcctgcggggatcgtgtggctgcctatgcggtgaatgtcggacaccgggaaatcggcaatgttgcagattacaatgtagttcagcttcccgatgatgtgagtttccggcacgcctcatttacaagccttgggcagacttccctgcagggcgtgcgcaaatgccggattgagctgggggaaagcattgtctctctcggcctcggtatcgtggggatccttgcccttcaattggcacatttaaacggcgctctcccctgtatcgccatggatggaaacgaatccagactggaaattgcctctaaatgccacgcagatttcatagtcagcaacagccggaacggatggcaggagcgccttctggagctgacctcaggcaaagggccttcggttgtcttcgataataccggtgttccggcaactatgggcgaggcatgccggctggcggcagattatgccagaatctgtatcctgggatgcccgcggggaacggccgatttcaatttttacagagatgtccagaaaaaatcaatcacggtgatcggcgctcatgccgtggattccatcccaagatatcactcttatcccaattactggacctttgctgatgatgctgactgcttcctgcgtttcgtccaaaagggggccatcgcaatcgagcccatgatcagccggaccgtatcccaaaaagatgccgaaattgcctattcggatttaatccgcaataatatgcactctctcgggatggtcattaactggctggaataaggaggatatttatgaaatacggctgttttggttttatacgacatattcctctgattgaggaagccggatttgacgccgctgaacttgatttttgcgaaattacggctttgcctgatactgctttcaggcagcttgcccggcgaattgaagactcacgtctggatttttccgttttctccggactgattccgcttaccgagcgttttcacagtgaaagctttgaccgaacatactggctggaacatatcagaaaaggagcggaccgcgtgtcccgtctcggagccgctttaattccattcggggccggtaaatgcaggagcattccggacagctgtttggatcgcaccgccgccgaagaccgaattctctccctggtccttgatatctgcaaagttctgggagaatatggaatcactctgctcatcgaacctctcggtcccgccaacagcaattacattaattatatacaagaagccgcctgttttgtgaaaaaggtttctcttcccaactgccggatcatgtgcgatttacgccacatgcataagctgagcgaaaatatggatgaaattgtaaaataccgtgatctgattctgcatgctcatatcgactatccgcgcggtgataaacgttttttccctgacgaaaatgataactatgactataccccctattttcatgctctctccgaagctcattacgacagaattctgaccatcgaggcaaccgcctacacggacttcccgaaagaagcttccgcgggactggcccttcttaaaaggtatggcagcaaaaagtagaaatcaggggcaaaaatatgcctgataaaagaaagaggattggatatgaaaaaattatacggaactgtggtccccattatcacgccttttactaatgaggataaaatcgatgttgaatcactggaaaatctgacagaatatatcattggaggcggcctgcagtgtctatacccctgcggaaccacaggggaaatgctgcttttaaatccggatgaacgaaaactagtggtggaaaccgtactgaaaaagacggccagacgtatccccgtattcgcccaggtaggtgcgatgacgctgagagatacggtagaactggccgtacatgcagtgagtgccggagccgacggcatcggcgtcgtcacgccatcctattttaagctttccgacgatggcctcgtggattattacacagccgtggccgcaagtgtcccggaagatttcccggtttatctctatgctatccctcagaatgcggtcaacgatatcaatctgtccgttgccgaaagaattgccgcttcctgtaaaaatgtggttggaatcaaatacagccggcccgatatcacccgcattcaggaatttatgaccattaatcaggggaagttctctgttctggtcggcccggatcatctgtttcacgctgtctgtgcaattggaggagacggtaccgtatccggcaatgcaatgatactgagggaacattatgagtcactctggagggccatacagagtgataataacaaagtctcggcaaaaatccagagacgcaccaatgtactgaatcaaatcctctgccggaaaaataatatttccgcctataaagcagttctctgcaatgaaggaattatccgtacccctcgaatgagagcgccgatggaatctctttcagaatctgaggccgccatgctggtagcggagcttaaaaagatgcattataaagaggtgcttttataagttgctgccgggcagttcagccctcataaattctgaagaaaatcaacactcactacctcccgtataagattttatatcaaatataggctctaagcgagtcaccaagcttttccatgttttccatacgctccagggatttctgcggattcacctgagccacagccgtggtcagatatacggcgattgacattgcctccgcaaccgggtatccgcttgcatttgaaaccgatagaacattctctgaagaaagtgcgatgggggaggtgtaactgtcggtgatagaaattacagtacatcctttatcatagaaatattttgcagtttcacaggttatccttgtataacgcgcaaatcctatcgcaatcaggctgtcctcggacgtaacgtctgcaaaggcgctgaaatccccctgcttcagcagaatgacattatcctgaagattatttaaaattgatcccagataaacggcaattgaataggaagagcgggctccaatgatatagacgcggcgcgctttcgtgatggtccgtacggaggaatagaaatttgcttcgaatgtttcattatatatcttccgaagggatgcggcattactgtctatcatggatttgagcgaacctccattgggagctattgccgcacgcctgatacgctcccagggagtcaaatctttttgtacatttttacgggcacaggcaataaaatcagaaaaattagcaaaggagagcattcgtacaaaacgtgtaatgctgggacagctcacgccggattgctttgacatttcattaatagacataaacgggatagcccggatatttgctttgacaaaatcagacagtactttattggtttttgaacaagaatcgtaattctgttctattagctgaataatatttttttccaaatgtgttcctcctcaaatcggaaacgaggttgatacaggcccgcggtttactataacagatagttcaaatatagcaaagcccagcgcaaaaatcaaccgtctggctaatcctcttgacttttacagtccgtctttagttactgttcacaccccgccaaaaagcggcgtgctgtaaacaataacacgcttcgcgatgcacagaaacggcaaaaagcgccgtttcgcgccgtgtaactcgggattttcgtgcagaatacgcacgaaaacgcctcgcggaacacaaccgtgtgaacagtaaccgtctttagacaccaccttgtgaataatgctgcggaatttgtaactatcatgcaaatttccgcaaaagaattcaacataatccacaaatatgaaattatattttcataatgttgatttttattttcatatgatgtatgataaatatgctgcagcattaaattatgaggaggtacaaacatgatcccattaaatgaaatcaccggttcctcgttagacgccctatttgtttatatggcattgcttggcattctactgttagccgcatcctggctcagacttaaaattccgctcttaaaaaaatattacataccggcatccctgattgcaggtgtcatcggcttaatcctaggaccttattttctgggcataattccgaaggaaatcatgagtgtctggtcgggaatgtcgagccgcctcattgttttgatttatgccccgatgctgatgggaaaaaggcagaaaagcggtgaaaagcttatcaaaagagcaagtgaatccctggttttttcctattttacattttttacacagtatgccgttccattgcttctgaccgcactgatacttactccggtattcggtgtatctccgctgttcggaacaattgtcgagcaggggtggtccggcggccatggaacagccggcggaatggccgccgtatttgaagagttaaaatggatggacggtgcaagcctgtctgtcacttccgctactatcggtctggtattcggtgttttggggggcatcgtattaatcaatatcggcgcacgcaagggatggacctcttttctgaatacctccgccggactggaaaataagaatactgaaatatataccgaccgctcagatcgtgaacctgatacgaaccgggtaatccatccatctgtcattgataatatggcgttccatatggcactgctgtcggtcgccgtattactcggctggctgattagcaaagccctaaagctctggttgcatttcacaatggcctggtttaccgcagccatgcttgccggcttactggttcagcttcttctaaaccgcacaaaatgggctgatattgtggataagcccacaatgagccacatacaggggatttcactggaatttcttgtagccggagccgtggcttccgttaatgtttctgttatcgtcgaatatgcaactccattaataattgagcagcttctggcggccgtcgtgcttgtttggtgctgcacctgggtttcaagccacgtatttggtgagaactggtttgaacactcaataatgctgtttggtgcctttgccggagtaaccgccaccggacttctcttgctaaaaacctgcgatcctaaaatggaatccggcgctgcggaagtatttgcagcccgttctcctctgctggcctgggcgacaggcggtggaatcctgacagccatgacacctgtatgggttgtgcaatacggagctttaaaggtaggcttagtctacgctgccgccatgttaatcgcattcgtattgcaatttgttctcggtttttggcataagcccgataaaatgaatgtctgaaccataacataaaaatatgtaaccgaataaaggagacaattatgaaacgtattatcttaacagcgccgaattttagtgagggccgcgatcaggaaaaaattcaaaagattctcgattgcttccgcaacagagaacatgtgcagattctgcgctggcagggagatccggatcataaccggtttggcgctaatgtgatcggtgagcccgaagcgatttatgaggccatgcttgaggcgattggcactgcccttgaattgatcgatatgaccaaacatcacggccagcatccgcgcatggggcagttgatgtcatcccctgacccctctgcgtaattgtacgatagaggattgcagcgaactggcccacaagatagcctcggaagctgccgataagtatcatcttccattctttctatacgaaaagtccgcaaacactcctgccagaacgaatctggctgaaatacgcaagggcgaattcgaaggcatggccgaaaaactgaaaagtcctgaatggaaacccgattacggcccggacacaattcacccgacgggtggagttacagccatcggagccagggattttatgattgctctgaatgttaatctgggaacaaccgatttgtccattgcaaaggagattgcaaaacgtgtgcgattcagcagcggagggttccgttatgttaaagctatcggtgttgaaatgaagggaaggaatttggtccaggtttcaatggatttgacaaattataaaaaaacctctgtctgcactgtcattgaatgtatcagggcgctggcattaaagcacggaatccctatcgtcagttgtcagatcggtatgctgtctctggatatgctgattgaaatagccagagaatatctcaatttggaatccctgtttgaaggccccttttctgcagatcagatttttgagacctatctgctgtaaccgtttgccttgaccaatacagaaagaaggaatacatatggattttaaagatatgaccgtcggagaatttgcccggggaatcggtgcggagctccccgttgcaggaggcggcagcgcagccgctctctccggcgcttatggagccgctcttgtatcaatggtttccagaaaaaccatttcgaataataaatatacgaatgtaaagcaccgctttcaggaagtggaccggcaatgcgcagtattacgtgagtcactgctggatgatattcagaatgatattgattccttccgcaaatataaaaccgcgctggcccttcccaaagtgacacaggaggaaagcgccgtacgtaatgccgccatgcagaacggtttaaaagctgctgttcaaactccgctcgaggtggctgaaaagtccgtcaaagcgctggctctatgccgcgaggctattgagaagggaaatcggaatgccggccctgatgccctggtcggagccttattgctgcgtgctgcaattctgggagccgtctataatatcagaattaacgtgaagaccatcactgacgagccgtaccggagagagatgctgaaccgggcaaaagacctggaagaaacagccatcagacaggaggcggaaattttaagtctgctgccggaattaactcacactaaataaataatttaaaaaacaatggctttcttcgccatataaatcacctttcctttcactgatagcggcttggacacctctataataagcggaaaggtgatttttgtataacgtcttgacccgcacccgcattggattataaattatgaaatacgtccaatcagtttcttgcggtacatttccagtgtatagcggtccggcagagacgactgggcacccagacgggttgtactgataccggcggcaattgttgcatactcgattgccgtatcgatagactctccttccgcaagcagaactgccagcgcactgataaatgcatcgctggccccggttgtatcgattggctccacatcaatggccggatattccttcccggccttcccatcggtaaaatagcacccctcttccccagtgtcaccaccacgtaccgggcgccgcctgcaatgagggctgccgctttctcgccgacgcttccttctcccggcataatctggttcagttccgtcttgttgggcaccagcatatacagctcttcaagaacctccggaggcagcattttatacccggagggcttgaggattatcctgattccatgctttctgcacagtctggtgataaacagcagtgtctcgtcaggaatactgttctgcaggaggcagtattcggaagaaagcaggatatccatgcattcttccacatgtttcctgctgatgctgtcgcttgtcccctgataatatccaatcagatattctgcgctcttggtcacaaaaatataggcaattccggttgatgcggcattatcgaaaccgattccgctcacatccacattattggcggcaaggttgttataaaggttttttccatccatatcattgctcagaatgctgatgatgcttgccgcgccatcgaggcgggccacgccgatggcctgatttcccgcctttcctcccggaagaatgcttcgctcatgaatcgtcatagtctcagtgcttcctaatatttcatccacaagaaatgtcacatctaggttcacaccgccgatcacgcagattttcactttgtgccggtccgtacttctggcagtactctttccctccttaaacatcagaccgacaggctctattccctgttcccgccgcgtagaaaccatatgaaaaacagtatcccaaagtatctttgcaagctccttatgcgggaggacgagtgtgcacaactccggcaggaatgtatgtccctcccctccaaaatcaaaggatatcacggataaatcgccggggatgttcatatgacgcgcataggcgcagctataaatcagtcttgcaatctccgtatcctgcaccacgaccgccttaacgccagtcttggccagaatttccaggacttctgatggttcctgttcccgaattcaaatatcaggctttcgtcaaaaacaatcttattgcgctccatacttctgtgtaatatgcggcagagcggaccgtccttttcacgcagcacagctgccattttttcaaaaccaagaccggacaaaaaggaaaccgcctcctccgcggccgactgaaaatctaaaaccggtttgtcctcatcctgttcgtccggcccgaacggcacgcagtaaaacggagtattatgctcccgcagcttgtcctgactggccgcttctattctgccatacagaaaaaggatatattccacacgctttcccaggagagagtcaatactcagcgcctccctgtttacatcaccgaacgtactggtaactaccagggaatacccctgttccatcgcatatccgtctaaatactgcacaacagaagcatacagacgatctgaaatatcaggaactaccacaccgacaagctgggttttaggaaatgctttgctgatcgctttggcatagggtgaataattatgctgctgtgctatacgaagcaccttttccctggtaacaggactgatattctcatccttattgttcataatcttagatacagtggcgatggacacatctgccagcttagccaactccttgatcgtcatggagatactcacctcattttcttcacaagttttcttatctgttagtatacaaaaagacggtaaaatatgcaagcagcgcaagaagttctatcttgcgctgcctgtaaatgatatgaagcaataaaatataccggccgttgtaaaaatccgcttttcaccggaccggactgtcgttcaacagcttttccacttcacttctctcaggaatggaagccgaagcccccaaacgtgatacagcgattgccgccgcggccgccgcctcttccaggcaccggcgtggagttttcccatccgtcaaggccgcaagaaaatagccggtaaacgtatcccctgcgccggttgtatccagggcctctactttccttgccggacagaggaaaacctcacctccggccgcataaaccgccccggctcctcccagagtgagtacaaccgccgtttcagggtattccctgttcaaaatctttatcatctgttccggttccgtcttttttgtaagctgttctccttccacctcattcaaaaagagaagggacaccttttctataccgcatttcagaatgtcttcctgaaaaggtgacggattcagggcaatcttcaatccgttgctatgagccttttctatcatataatccagcccatttacctcattttgcagcaggagccactctccctcttcaaaaaaggccagagcctcatccacaaattccggtttgttggcctgattcgctccgccgtacaaaacaatactgttctgccctccccgctccacctggataaccgcacttccgctgcggccctctatcctccggataaaacgggagtccacaccgcttcggcggcaagcctccagcaaaggatcgccgtcttcccctgtcatccctccatggaacacactggctccggcctttgcaagcgcaatggactggttcagccccttcccccgcagaaaacctccagaccggacgaagctacagtttcaccgggagctacaatgtgctgcacatggtaggtatagtccagattcagcgaaccgtaatttaaaatacgcaaatcaactctcccttctacgcttccagaaccttcttatccatggttccggatgccgcacactgcctgatacagtttttcatccaggctgcaaacgctccggagtccacatccagcgccacacggcaattcggcatattattactgaagcgggtggatttctgcacataagtgtgtccgtatgtgtatgtccctgcacactccacatccacatagtaatcatgtgtccgaagatactccggcctgcaaatggccatcacggccaaagcatcatgcatgaccacgtcctcacctttatatacatcccggcgcatacgcataaagtccagcaggtctgccgctatatcggaagccgttgtgccgatcccgcgtatcccattacagtcggaatcagaaagaactgcccggagtgtcacatccagtcccaccataaccagggggataccggagccaaagacaattttggccgcctccggatcaaaaaatatattaaattcggccaccgcgctggaatttccgccttccacggctccgcccataaaataaatgcatttaatcatccgcttcagctccggatagacattgagcgccagggccaggttcgtctgaggcccgagagcgataatctccagttcccctttgcattgtactgcctgctcataaatggtttctaccgcattcttttcataaaaagaatcgctgctttccaacagccgcacattccccatgccggtctgaccgtgggttccaaaacctcccggagcctccttgtccgacgctctaagctgagtaatgtcccgcagcagcggcctctcagccccctggcaaccggagtatcaaaccccagcatgcgcaccagattcaaagtatttgccgcggtgtacgccagatccacattaccgcagacagtggtaatcgccctgatatccagttcttcactgccgagtgcggcaataattgcaacagcgtcatcagttccggtgtcacagtcaataattacagaatgcttcttcattaatctatctctcctaatattcagcggatcgccgctttttgtatttttttctcacgacgcctgcgcacgatcgatataaccaccaggcccaggattgtaatcgcatatggcagcataagaactaaatctgccggggccgatgtcatctgaagaatgttggcaaatacgtcggcactgccgaaaatgaacgaagaaaccaacactcccagaggcgatccggccaccatattgctggcagacaaaccgataaaaccacgcccggccaccatgttccggacaaaagcagacatatagcccatagacatatatgcccctccgacaccggccagagcgccggaaatcataaaagcaatatatcgtattttcgtagcggagatccccaccgactccgcggcctgaggattctccccgacagaacgaagacggagtccgagcctcgttttatatataaagaaattcactaaaaatgcagctgcaaaagcgccgtatgttaaaatgttatgtcctgatacaatccgtcccagtacaggaatgtctttgatgaacggaaggttcaccaccggcagcaccatactctggatacttccggctgagttggacttgtccccgctggcaagaaacaatacaaatacggtgcctcccgcagccgccaggttcatcgcaatgttggtcagatacaaatccgccttaccggtaaaagaggcatagctgataatcaatccaaccagaatccccgccaggattgcagccccaaagcccaccacggcgctctttgaagcgccgctgacaataactcccgccagggctgcccacagcatcatactctcaatggccatattgtccacactggccttatagcagacggacgccgccagggccgcatagacaatgggagttgccagacgcagcaatgaaaagcaaaacgttataattaactctacatccataacctgtcaccaaaccgtaaaaatacggtattctcctttcctcccattatcatgcctttaccgcctcctgctgtttttccgtattttccagggattccctggccgatttaaatatcatacggcgttttaaaccggacaggaacatctcggctgcaatcaaaagaattataattccctgcacaattgagacaaattccgccggaatgtccgtggtgcgtgttacgatatcagccccggtccggatgtatgccagcagcagcgcgccaacaggaactaacgccgggttgcggtgggccataacagccacgatcaggccgtcaaatccgtagttcggcatttccagccagcggaagcgttcataacgccctaatatttccacggccccgcccagtcctgcgaaggcgcctccgatgatctgcgccgccacgaccgtgcccgtcacgctgattccggcgtactttgcaaaattggggttgctgcccacagtgcgcattgcatagccaaaaggtgttttatagatggcaatcacaaccagaaccacgcagactgccgcaataatcaggccggcatgaatctccgttttcgggacaagaacggccagtttcagctcttccggatatttgagagaagcgaggctcggcatggagacgtctttcataccatacttcaaaatgaattgagacaggtagaataaaatgtaattcagcatcagcgataccacgaccacatgggcgtcgaacctggcatttaaaacagccgggatagcagctgccgccatcccaatcaggatggaggtcagcagcagaacgggaagcaggattcccttgggaattccctggagctgtatgcccagataagtggtcatacagccggaaatgataacgatcccctctgccgacagattgaacttattcacggcatacataaaacacatgcaaagccctgtaaatgtgaacagtgtagccagcgccaccatatccccgaaccgccggattgtagaaaacggcccgacgataaactgccggatcgccattaccggctcatcactgatcacagtcagtgcgatcagcgaaatcatatatgctatcaaaaccgcaatgataacgcggaatactccaaaaaatgattctatttttctcgcagttttcatatcacgcccgccatttcttcattcgtcataaccttcagtcccagcatatactctcccagctcttcttcactgacctggttggctctgggaaaggccgctactattttgcccttccgcattacaaagagccggtcgctgacctccagcacctcattcaaatccgcagatacaagaagcgctcccacgttttcctccctgactttgcgcagcagtgttttccgaatcatttccgccgtccccacatcaattccgcgcgtgggctgattggccagaatcacgttggcgccggaggtaaattccctggctaccaccaccttttgaatattaccgcccgagagcatccgaaccggctgatcccgatcatcacaggcgatctcgaattcacggatatatccgtcaacctcttgattaatcttcttctcattcaggaagatactgtttctgaactcttttttgcggaagcggtcggctataatattctccttaatagagagggtgcccgcacatccgaagaccatcctgtcctctgaaatatgtgccagtccgttttcccggatttcccgtacacttttgccatgaatgttcattccgtttattaccacagtcccctgggaatacgacttcattccgctgagaacctcagaaagctcgctctggccgttgccctccacaccggcaatgcccacaacctccccctcacgtatggaaaaagacatatcatcaatcagccgccggcctccctgatctgccacgacaagatttttgacatccaccagcactttaccgttcttcggatcttccttctccattttgaggactacatccctcccaaccatcagccgggaaatttttgcttcggtcagatccttcacctcataggtcccctggctgtatccatggcgcagcaccgtaacacggctgcaaagacgcattacttcttccagcttgtgtgagataaaaatgatagcgtggccatcctcccgcagcagcaaaagctgttcaaataattcctccgtctcctgaggcgtcagaacggctgtaggctcgtccaggattagtactctggccccttttatcagcgcctttaaaatctccaccttctgcatctgcccaacgcttaaatccttaaccctggtacgggcatccagagcaaaattatatttatcggcaatcttctgggtcatgacaactgcttcctcaaagtcaaacaggccgtttttcatcggctctatgcccagtacaacattctctgccacggtcagtgaatttaacaacataaaatgctgatgaaccatgccgacccctttggaaattgcatcaagcggacttgttattttaaccttctgttcacggataaaaatatctccgccctgcttgtcttccattccaaacagtattttcatcagtgtggtcttccctgctccgttctcaccgaccagactgtgaatttctccctcattaaccgcaaaggttacatccttgttggctacaaatccgtttggataaattttagtgatgtgatccattcggagcatttccatatattacgtacccccagtcatgaggaagaacagccgggaccggctgctcttcccgtatgtatgataaaccagtctctgccgcttacggagcaaacgtattaatatatgcgttatactcttcctcgttggcaaaatctttatatccttttactgtcagttctccgtcaataatcttctgctttgcctcttccacctgggctatcacctcgaccggggcattctctttcagcatttcgtcattgacatagtcaacgccgcctgctttaacgcccaggactcttaccgtcccccagtaatcttctccgccgagataatcctcaaatacgctgacaaagctcttgtccacctgcttgagcatggaggttacaattacatccgcataagcatttccggttgcctcaaaaattgcatgctgatcagaatccactccgatgctccacgttccgggagtcttaagggccgcctcaaaggctcccaggctggcgccgccggccaccgggaagaatacatccgctccataagtactgttctgctgggaacaaagctccagcatcttggccgaatccgtccaattccccacccaggaggtaataacctttatatcagggttataagctctggcgccttccgcatatccggtgataaagtcacagattaccgggttctgaacgccgcccaccgtaccgatgactccgttcttgctcatggctgccgcaatcatgcctaccagataagaaccctcattctgggcatatgctatgtataatatattatcagatttcacttccacatcacggctcacatcgaaaatgataaatcggatgtcgggataatcttttgccgctctctccacttcctcctgaaattcactggtagaaagaacaaagtcaggctcgccctcacaaacatcaataacataagactcatatttcgatgaatcggttccggcctccacggccttggttttaaatccgtacttttcctccagcatatcaaggccgcgcttaccggaatcggcaaaggacatatcgcccagggtcatacagaggaatgtgacgctgtactgcggtgtaccattttccgcttcgccgcttttgcctgccgaagctgcggctgtactgccattgtctgccttgccgccctgcgttttgctgtcccctgaacacgccgtacaggaaagtgaaagggcaagcgccaaaagaagagaaagtgcttttttcatgtagaaaacctcctaatttttataggaaaacatttacttaaaatgttttctttttagatattatcataaacttttgccattgtcaatatacggctttgtctattttccataactttcaccaataatccgcacaggttctgggctaattgcaaaaaaagagtggaattctaaaaattccactgccttcaacgattacctgcacgctccgcgcacaggtcaccgtcatcaacaaaaaaaccggcggccgaacaaccggccgccagttttaattattcttaatggataaaataattatccatgattcattttttctttcttaactttcatataaaagactaaaaccctacgtatcatgcagcataaaatgcagcgcagaatatatcagggtaacaaaaacagcgggtgatgggaatcgaacccacgtatctagcttggaaggctagtgttctaccattgaactacacccgcgtaatgcaattacagtattgagttgtcaaatcggggtgacaggattcgaacctgcgacctcctggtcccaaaccaggcgctctagccaagctgagccacaccccggatatgcacggcagaggttctctgttctgcaatgcatggataattatatactatgcggattcagttgtcaaccgttttatacaataaattgtgtcttcgaaaaagttattttatatgaaattaatacaattttttctgctgcccggctgcattctgatgtgcttacagataattaaccgtatagtgggctttcccctccccgtccagctccataatcatatagctgggctttcttccgtcctgacgcgggaaagacaggctgcccggattcagtattgtcaggtcgctccgtatatcgagacacggcttatgggtgtggccgaacatggcaatctgtaccttacggtccctcgcctcatccgccagacgctccgtccccaccgacacgctgtaaaagtgtccgtgagtcaaaaaagccctgtaatctccaatggaaatctccttttccctctccagattggaaaaaaagtcattattccccagaatcatatgaacctggcagttctcgttctgctcgcggcaccatgtttcgatcctgtcctcgctcccttccgcatctcccagatggatcagcatatcaaaaggagccgtcttttcaattacagtctgcaggttaccgtccctgcgatgtgtgtcacttacgattaatatcttcatcgtttccctccaaagccgctttcagcgcttctttcatcctttccagtgctttaccgcgatggctgattttattcttttcatcaattgtaagttcagcggaagtttttccgtactccggcagatacaggatcggatcatagccgaatcccccgtctccggcaggttccctggctatcagcccctccatgaccgcctgcgtgtgaaggacttttccgtcagggagaacagcggcaatattgcatacaaaacgggcgcttcttttggctccgtccgcgccttccatcctacggatcagcacccggttctttacggagtagggttcattctccagatacctggctgaatacactcccggctctccgttcagataatctatgacaagacctgagtcatccgcaagaacggttcccccgtctgttcccagacagcccgcgccttaatctccgcattttccgcaaatgtcgttccattttcctcgatatcgcctttaaatccggcctcatccatggaaaggatctccttccccaaatcagccagaatcaggcgtacttccttcatttttccagcatttcctgttgcaaatatcactttatccttcattttccgtatcctctgtttttctcgtgtatgctttgagacatacattgcatttctgttcctcctccacccgttcccaggaggtgcctttaaaactgatatatccttcgccgtcactgagatcaacgcgaagatttttatcgggtgaattatattctattgccaccggatgaacggagccgggcgtattgatgctgacaataacagcaaattttttaccgtccggaagttccatcggtttgcgaaaatctatcgtataaaatccggcgtttttcagtgttccggaggctgccaggatccgcctgccgaattgggcgctgccttccacatccgttaccgtatatacttcatattccgtatcctgacctgtggcataaaaaccggctgccgccagttcttctccttcacctgccgtatagatattggcaaaataagcattctccttgccatagcccagctggcctacccagccgcacaaatcactctgataaatcttatcatagttatcggtattatcaactctggaatacaggatattatgtattccaatgttcgtatcatagtaggatacatagaaatatccctcatccccgaattcgcctccccagctgttggcgcagataaacgccccgtcaccttccaggtccagattgaaattttctttcgggtaattatcatcccatccgataatcactatgtcgtgattgggtttggctgttccgatgtagcagtaagcgccctgttccttattataatagcgcgagtcactctggcctgtcaccatggaagtatagagggagctttgcactcctccataaagatataccgccctcttgattgcctcataatctttgcttggtataatctgaatctcctgaacatgccggaccggcttaagtccgggcggtgaatactcatcgccgtatacgtcgtccttttcataaaccggaccctgccatgcaagaagataggccatggacatcgtatattcgccgccgtcattctgtttcatatgaaaactgttccggatggacatatgatcttcggaaaagcttaaatcttcttccggaagcagcctgctttccaacgccatgactgaagcaaatgcccagcaggtgccgaagcttccctggttcttaactcttggcgcacggcccgtatcccggtaatcataagcgtatggaatgcttctctcttcgctgcctgcaaaagtaagctctagcgtattctcctccacatcccactcgcctgtataggaaagagccttctcgacggcctccagaggcacatacaggatgttatcctctcttaaaagtcctgtcttcagagttaccggcgcaccgttcagcgtcatccgggactctccttctttcatctccgcatagatggtattcctttccataaccagtctggaattgtcataaatcctggctgcacatgaaaaataatccggtaaaaagctgaccggaaccatgaattcccctcgtctgtcataataacggaggcctttttcgccttcactttccgtccgtcaattttcagtttgatcctcttgtcattcacttctttcgatatgagggaataccagccgccgttaaaggttcccggttccttccctttcttcacctgctcacgggtgaaaagagactggttcttagccgcgatacagacgaacagcagaaccagcaaaactatatataaacgtctacgcctcaactgtctcccctgcttttctttttggtggtctcggcccataaactgataatagtatgtctttatcattccgttataaattttcctgtttttgtccgctttttttccaatatatttctccgcctcttcataagcggttatcaggtacatggaccaggaatcaagcgctttgtaccgctctccaatctgcctgtacaaggcaggaagatccttcttgtcttccagacgctccccatacggagggttagagatgataaatccgtattttttcggatgactcaaatcagacaaaggcctttgctggaaatgtatcatatggtccactccggccctcttcgcattctctcttgcggcctttatcacttctgcgtctatatcatatccctgaatatccactgtgaccgtatcgtccaccatctccgaggcttcgtcgatggcgtcataccagcattttctcggtatcaggtttttccagttctccgacagaaaagatcggttcagcccgggagcaatccctgccgctatcatcgccgcttctatcggaaatgtgccgctcccgcaaaaaggatccacaaggattctgtctttcttccaaggtgtcagcataatcagcgcagccgccagtgtctctgtaatcggggccttgctcgcctgctgtctgtaacctctcttatgaagggaatcgccgctggtatcgatggctaccgtaacctgatctttatagaaaaaaacacgcagcggatattcactgcccgtttcaggcatccgctcgagatcaaattcagcctgcatgcgccgggcaatggcctttttcataattctctggatatcggaagggctgaaaagtttactgttgatggaggatgctttcttaacccagcatttggcatccttcggaagatacttttcccaggggatttccctggtacgctcgaacagttcatcgaaagtcacagcctggaaacttcctatttttaacaaaaccctctcggctgttcttaagaatatattggcacggcagattgcctcggcatcaccctcaaagctgacgcgtccgttctctacctctgtaatctcatatcccaaatcagttatttccttctttaaaacagcctccagcccaaaatggcagggggctatcagttcatatcgctccaaactgtgtcctctttctttctgcatccgtatttttaatgtttcttaaaagcaactgtccggtccgttcatacgtcacctctacaggaaacgccgccttttgaaagctgcccttaatattactattctaatttacctaattgctcctgtcaatgtccttttccctgtcatttgccgtcaaaacgccgtttaaatcccggtcaatcgtccgtcaggtattttccccggtaaaagcggagaccattggccacgttgacaacctgatatcccttcctgtaatacagattgcagaccagcatgctctcgcttccccttgtacagtagaacagcagtgggcagctgccgtctaacagatccggatcatccataagttcatcaaatggatagttttccgcaccgcttatgtggccctgacagtaagaggagggacttctcaaatcaatgatcctgccattatatccctgttccagccattgatcaagatactgaatcggaattgttttgtacatattgtacctcctgtcccttttactgtattatattccctgaggacagacttgtgccttccccatctgttttttattgctgttcacacggtacaataacaaaaagggtattcctctcccgggaaacttttatccccgcagaggaataccctcttttggctttatgcctgccagtttttacaattagaaattgtttctgtcacagttgctggaattgttctggctgtagttcttagaactgttctggctgctgttctggctgctgtttctggagctgttctgagaactgttctggctgctgtttctggagctgttctgagaactgttctggctgttgttctgagagctgttccttgagctgttctggctgttgttctggctgctgttctgagaactgtttttgctgctgttgttgtccatatcattgtaactgtttttgcttgacatatttgttacctccaaacgattttttgttacaacgatagtatggctgatgattaattaaaatatgcaccctgtctgtttacaatttttttcaaaaaaacacagctgcggtgtttatgccgcagctgcgctttttatatattatcctttaaccaagcacactgacaattttgacaggtgcgcggtaattccaattggaaatcttgattccggtacgttctgtagacgcatgtacaatctgtccgtttcctatgtaaagagccacatggttaatcctttttccatttccgtagaaaataagatctcccggctgcatctgtgccgcgctgatgctgactccctgtgctgcctgggaaccggaagaccggttaaggctgacgcctgctccattctgcattacgtatcttgtgaagcccgagcagtcaactccggtatgcggatcgctgccgccgtatttgtaacgtccgcctacgaactgaagtgcataatccacaacctgctgccttttagaagtctgtgtctcctgagcctgctgcgccgcttccgccgcctcatcggcttcctccagtataattccgtcagtcttaagataaccttctttatctccggccgtaactctgacccaaccgtcggaaccgctttccaccacatcatagattccgcccttctgagccatagccactacttctgagccttcgttctcttccgcgtagatggaaatatcggctgcttccactttggccaccatctctgcttcaaacccgtcagccggtccggcaagaaccgtctgtgttcctgctgcggtgaacattccacagatacacatcattccaaaaaacttaatgcttttatttatattcatccaaaatccccttgactgttatttgctgtattcaattaaattatcacgaaaacctttctgtttattaaggttttctttctaaatgttacataattattaaatcatgttacgttgttattatattttcttttctcttctttgtcaagtttgttctggatgttttatatttattttataatttacataacagttcatttgggcagctgctaaagcatatggagttttagttaagcaggtgaggacgccgccggtacggccagcggacgggtggtgaggtgtgtatatgagtctttcgtcccggggaagattattgtggtttggggctgcgggcgaagataaagtctgcggagcacgctcccgctctgtgaaatgcatcgcgctgctaagctcgtaagggacctcgctaatcagcgatggatttaggcggcatccgcagactttatcttcccctccgccccaaggccagggtttcgccgggacgaaagactccgccgggtgtatcggccccgtccgctggcctgcggccgctgatagtctcacgcgttaagtgcgggggcggaccttgtcgaggccactcagtgcttccgtgtgcgggaaatacgatatgccttcaaggctcccttatgaaagaattgcggaaggtttgataccggcctgccggaaacacgtagtggccgcgacaaggccctccccatttaaggttggagacaatcagcggccggagcggaccatgtccggtgccgcgaaaacctccgcctgagtcttccgtccccggcggaaacctgacccggggaagtaggcggaatcaattgcggaggggacatgggagtccgccggtgcttagcgaggtccctcacgagcttagcactgctgcgcactccaaagagtgcaaacggtccccgcagcaattcattccggccggattccccctcacgacaccctccaaccggggatggaagactcagccatccccctcaccacaccggacatggtccgttccggacgcgtcctcccaacctcagttaaatctccattccaattttacttttccctcccattcttcgtcaattttctttcctcccagtatgcccacagcggacctgcaatacatacggaggaatagcatccgctgatcaggccggcaagcagaggcagtgaaaacacctggatcgattcaattctgtaaataaccgaaaagatatatacgataaaaatgctcatgacaaccgtaagcgccgtattgacggaacgccccagcgtttccgtgatgctcctgtccaccaggccggccaggctcgtcttcgttcccgcctctttcatgttttcacgtatcctgtcatagagtacgattgtgtcattgatggagtaaccgataattgtaagcgttaccgctacaaatgcatcattaaccggtattctgaaaatcccaaaaatgaagacaactatcagaatatcgtgaacgagggccaggatagccgacatcccggctgccagccccgacaatgaggaaaaacggaacctgatatagacaataatgaaaagagccgacagaactactgccgtcaccgaatttttgagtgctttagccccgatatagggctctacggcaaatgtctcggataatgcaaagtttccgcccaggctgtttaaaaaatctgttacctgagcttgttcctttggcaggattccccggttgccagccagagtcagcaccagctttttttcaccggtcagaggatcctccgatgtctgtacgctgacagggcggcccagttcattttccactccggctttgacagcttcagggtctgcttcctgagcataggtatatttgagaataacgcctcccgtaaactgcgtatccaatttcattccattcttagcgctgagtaaggttcccataagaagcacgcagcaggtaaagcacagaatccattttcgttttttggaaaatcccagtacctttttttctctcttcttccggaacatacgctctttgcagaaagccggatactctgtcagggagttaagaattgccctggacatccacactccggcaaaaaggttgataagaactcccgtaagcagcgtataaccgaagctcagcatggttccggagccaaagaacataaggatggcggctacggccgcagtggttatgtttccgtccaggacagaagaaaatgcgtttttgtatcctcttctcaccgcctgctttaccgtcatcttattcctcaattcctcactgatccgctcgctgatgataatattcgcatccaccgccattccggccgagagaatcagccctgcaatacccggcagtgtgatcgtatactggggaatcgaaattgccagcacctgcaatgacatctgaaacagcagcgtcaggcagcttacaattcccggcagcctgtaatatgtcatcataaacaggcagatcagaagcagggagaaaagccctgccgccgccatggactgaagggcctggtttcccagcgtggggctgattgtattatagttggtggttttcatggaaaacggcaatgcgcctgcacgtattttttccgccagctgttttgcctcctccggggaattcataccgcttatcatggctgtgccatccgttatcgcctgcctgacgaccggcgccgatatcagtgtttcatccatataaatgccgatcctctgcccggtcagtcttcccgtagcctctgcaaatgccgcggccccggcgtggtcaaaggagaggctgacgacgctttcccctgttttcggatcccggacagcctcgctgccgcttacatcctttccttccaccagcacatttcctttttcatcccggaaggtgagccgggccgtctctcccagttcggcaatcgcctcctccggattgaaatttttctcatccgatttccagggaaaacggacaataacgtggcctgcctttttatcaaccgtcacttccctgtccagaatatttttggcatccagcctgccctctatcacatctctggcagattccagttccccttccgacggccggtaatcccctgccggttcgaatacagcctccactccgcccggatatcaattccgaaacgcatttccctgattccctttacatcgtcaccgcatccgaaaatggcagcataaacaaagacagctataacgatgcaagctatccatatatgatttttcttatttttcacgtgtattcctcctgcaatataatttaacggtgcagcccggctttctttcggctgaacataatccaatttcaggcggtaacacgtttttttccatctcttttatggagaatacagacaagatacagagcgctgcccatctggagcagcgcggtacaaagatgcagacaaaagcttccctttaagccggcaaagctgtccgaaaaggggattgtaaagaaaacagggcagtctccgccctcaggaggctgcagactgtccaagtcaggctcctcctcttttatgtacagaccgtttttatatccggcctttaccgaaaaagagacaggctgtgccgcagggagaaatctgcggtcttctccttcctgcttgccggcctccgtctccaaggcacaaaaaaccccatcagccttatctccgccggtaaccgggcggacctgattaagactgtggggcctgaaaaataatataagcagacagaaggcggccggaagaagaaataatgcggttctgactgatttctttcccataccgctctccctcctgtctgccgtaaccgtcctaaattcgttatcattccgatatgcgaaactatagcacagcaggcttcgggtgtcaattctccccgccttcctttctgcttttttatcgttttatttacattctgcgacggtcagaaccataacggagcgtgcgccaatccggcacggctcatttccggataaagaacgttccggctgctcatccgaggtatccgccgccagtctccatcggctgtgagccggaagtttcggcagctccatatactgttcctcccaatatggatttaccgccagatatacgatatcatctgtctctctttcctcatcatatcctgcgaacatgactgccaccgtccgcgtttcatttgtaacggaagaatcccaggctctcaatgtatgcacgctgaccgcaggaaaaccgcatcttgccgttcccagttcatgtccgatgaccttgtgttcttttctgaaatgtatcattttcctgacaaattgaaacaattcctggttcttctccaccagtccccaatccagccatgataattcgttatcctgacagtatgtattgttgttaccatgcttagagaaaccgaattcgtctcctgaaagcagcatcggggtccccctgctgcacagcaggaccgcgcatgcattcttcatcagcttgagccgcagcctgataattctctcatcatcagtaaggccctccgttccgcagttccagcttctgttgtcatcggtcccgtccgtattgttccagccgttatcctcattatgcttctgattataggaatagagatcacaaagggtaaaaccgtcatggcaggtgataaaattaaccgatgaattatatccctggtaatccttctccgaacggtacaaatccggcgatccggcaattcttttcacggcctggggagccagccagtaatcaccttttaaaaagctcctcagctcatccctgtattttccgttccactcggcccagtggctgaaagccggaaaactgcccacctgatagagtccgcctgcatcccaggcctcggcgatcagcttcgtatctcccagaatcggatcaaatgcaagtctctttaagagcggaggattcagcatcggcgccccgtcctcattccgcccgagaatgctggccaaatcaaaccggaaaccgtccacatggtaggatgtcacccagtaacgcagacattccacgatcatctcctgcactatcgggtgattgcagttcagcgtatttccacagccgctgaaattgtaatagtagccctccggggtcagcatataatatatattgttgtcgaagcccttaaaagaaatcacagggccatgctcattgccctcagccgtatggttaaatacgacatccagaataatctccattccgttctcatgcagcgctttgatcagagtcttgagttcttcccctcccggttgtattcatcggccgccgtatagctggtgttcggggcaaaaaagcttaccgtattatatccccagaagtcgcagagtttttttccgccaaccacccgggcatcctgtgtctcatcaaattcaaagatcggcatcagctctaccgttgtaatccccaaatctttcagatagggaatcttctccatcagccccgcaaaggttcccggattcttaactccggaagacggatgattcgtaaagcccctcacatgcatttcatatatgatggattcactcatggaaagccggggagggaacacatccttccagtcaaagttatttctgacaactctggcatggtactgatcttcatcactgcgcttcactccccagacgctttggccggttatcgctttggcatatgggtcgagaagcggctttgtcttatcaaaaagcagtccttttgacggatcccaagggccgtccagccggtaggcatactcaaattccgttattttaagcccgaatacgatcatggaatagacatttcccaccctgtaattctccggaaacggtatcacggcatacggactgttctccattctgtgatataacagcagttcacaggagtacgccccatgggaatggacggtgaaattgacggcgccgggcagcgcagtcgccccattgcttccatacagcccgggccgtatcctgaatcccgccgccttgtcaagcggctccatctgttcgtactctccgtcgggcgcaattatattggcgcaatccgccgtcccgtaattatcctgttttctaatcccattatccgccctgtctgccattatatcctctcctttaccgctcctgtcaggccttcctgctgcaatccagcgtgaaccagaattccacgccgttctcaaggttcctgacgccatatttcttatgatgggaatccataatcgcctttacgattgataatccgattccgcttcctccgtattccctcgttctggccttgtcaaccttgaagaatttcgtccagagattcggtatatccgcttccggtatcggccggcccgtattaaatacagtgacccttacctcttcttcattcctctccgcgcggattattacctttttatcaccctccgcatggttgagcgcattattgaaatagttcgtcactacctcctctattttaaattcatcgccccatacataaagcggttccgtacaagaaaactctacggttatctgcttctgctggagaatcaggcctgccgccgatatcactccctggatcagctctgtcagattgaaccgttccatcaccgtctgttcatttccaaactccaacgcggtcagcgtaagcagttgttttaccatcttattcatcttgcctgcttcatccatgatgacctcgcagtaataatcccggctctccttctcctccgccattccctccgtcagcccctctgcatatccctggatcagtgcgatgggcgtcttcagttcatgggagacattggcgataaattcttttctcatttcatcaatctgcgtcttttcttcgatgtccctctgaagctggatattggcggccttcagttccccgatggtgtctctcagtttgtcggacaggacattcatgctgttgccgagtgtgctgatttcctctgtcgggtgtttggtatcttcgtacttagcctcaaaatccaggttggacatcttttcagagagctgtgacagctcatgaatcggagccgtgactcttctcgttataaaatagagaatgacgctgctgaccaggataacggcaatccccacatacatcaagaaccggttggatatggccgcgctctccctgatactgtcaaggggcgtcgtcataataaagatagtgccgttatcggagaaaaagccccagctttcgagatagactgtttttgtcctgggatcatatgttttctgtatcatataattttcatgctctttaaggatttccctgtgcggagcattcctacctacaatatactggctcaccctgtccttcattacctgaatatctttcatagaagataccaggatattaccgttcatactgtcgcagatcagcagtgtgatattggacgtatccctcagatagcgtaccacctcagccagctttgcaacaccgctggcttcgctgcttccctgtgcgccgggactttccgaagaaccatcttcctgctcttcttccggatagtttcgcccccggttctgccttcccgcatccggatttccgacagtaaaaaaatcagcggagctgttaagctcatcttccgcgccctccaaagcgcttcctccgttttttttctcttccagcacaatcgtatcaatcgcatggtagcctttctccagaacgcctattttataattctggtaatagccctccaggaaccagttattgatacaccatgtagccgtcacggccagggccatcatgctgataaatgttactgtaaatttccacttcagcgtcctgtgtctcatccgtctacctcaaatttatatcccatgccccagatggttttaatataatcgcctttatcgcccagcttgctgcggagctttttcacgtgggtatcgattgtccgggcgtcgccaaagtaatcgtaattccaaacattattcaaaatcttttctctggagagtgcaattccctgattctctgcgaaatacgtaatcaattcaaattctttatagcttaaatccacatttttaccgtccaccagaacctgatgggctgatttgtcaatatggatccctcccacgtcgattacttcctgggacatcgtgctgcttctgcgaagaattgcttccaccctggcaaccagaattttgggactaaacggttttgaaatatactcatccactcccagactgaaaccctgcagctcgtcctgttcttcccctctcgccgtcagcatgattatcggaacctgggaatatttcctgatagttctgcaaacctcccagccgtccatcttcggcatcatcacatccagaagaatcagtgcaatatccttctgttcaaaaaaatgtcaatcgcttcctccccgtctccggcttccaccaccagaaatcccttgaccgtaaggaaatccctgaccagtttcctcattcttgcttcatcgtccactaccagcacttttaatatttccatatgattcacctctgtgttatctgatttatgattcgcccgctgtttacctcttctgtatatacagttttgccgcacagccgcgttttatctatgttttatctgtattttatcagattatagggggagtttccacagtttcacagagatttcacagatgggggatttaactgaggcccggaggacgcgtccggaacggaccatgtccggtgtggtgaggggggctgtctgagtcttccgtccccgtgggaggttggtcgtggagggggaatccggccggaatgaattactgcggggaccgtttgcactctttggagtgcgcagcagtgctaagctcgtgagggacctcgctaagcaccggcggactcccatgtcccctccgcaattgattccgcctacttccccaggtcaggttatcgccggggacgtaagactcaggcggaggttttcgcgacaccggacatggtccgttccggacgctgattgtctccagcctcaaagggggcgggaccttgtcgctgccactacataatactgataaataatatatattatactgtaattacaccacaccgcacaataacctgcacgtttcgagtacaggtcacagccatcaatcacactaaattgagcggaattaaaaccggtgatattcttccggtcttaattccgctcaatcttttataaacatcaaatatattaaattatgcgtaagacaatcagcggccgcaggccagtggacggggccgatacacctggcggagtctttcgtcccggcggcgtcctcacctgcttaactaaattattgaatgctgtgacctgtgcgtgaagcatgaaagtcaccattatccaatatcaatatgattattattctccggctgctgccgcttcgttaattacggaacccgcatcttccgtcagttcagaggtacaatgagcacattttgttgctccgattggaatctcgctcttgcaaaacggacaaattttcgttgtcggtgctgccggcgctgcttccttattatgtaccattttggatgaaagtgcattcatcgctttcacgaggcagaatataacaagggccataatcaggaaattgatgaccgccgtcaggaattttccatatttcaatgtaacatcacccatgatgttcagcgacagctcatcgaaattcaaacctccaaatatccccagaatcggtgagaggatatcatctaccagagatgtgataatggaagaaaaagcgcctccaatgataacaccgactgccatatccatcacattgccgcggctgataaatttctcaaactcgtgaataaaacctttaccctttcccatttttttcctcctttgaatattataactgcagccaggaatactggccgtccttgtttaacattttagcatgaaataacgtttttctcaataactctacctgaatgttctaattgctaccaaatttcccctatttgttccaaagcagctccatcttgttgacaaagcaaatcctgctatttatactttaggtcaccgccttcaataaaatagacgcctgccaattcagcagacgcctatcaaaacattatatttccttttagctttttattatctccttacttatttaagaaaatcattgtaaatgccggaatataggtaatcagaagcagtaccacgataagagccagcaatggcttcagaatcttccgggtcagctcttctatcgagacttttgaaatagaggaggctacaaacaggttgatgccgtatggcggactgcagaagcctatcgcaaggttcattgtcagcataattccgaaggttaccgggtgcatcccgatgcctgtgcaaattggaagcagaatcggcgtcaggataattgtggcaggaatgttatctacgaacatgcccacaatcagcaggaaaatattaataatcaaaagaatcagtatcgcatttccggtcagtccgagaatcccctgtgctatcatattcggtatctgcgccattgtcagaaatgccgcaaatacggtggaaaagccgaccataaaggtagtcgcgccgtttaccacaatcgcatccttaaaggactgataagctcctttgatatccagctctttatagacaaatacgcctataataaaggaatatacaactgaaataacggcggcttcagtcggagtgaagaagccggagtagattcctccaaggataatgacaggggagaggatggcccagaatgcgtccttgaatgtcttccaaatctcagccggggtagatgccttttcctttcctctgtacccgtttttcttcgatacaaaataacagacgaccatcagggcaattcccatcataattcccggcagaaaaccggcggtaaataaatccgtaatggaggtgcccgatacgaccccataaattacgaacgggattgacgggggtatgattacgccgattgttccggccgccgcggtcagggctgcactaaagggcttattatatccgtggctcaccatttcaggaatcataaatgcccccacggccgatacggtagcaactgcggaacctgaaatcgccgcaaaaaacatgcatacgataattgtaaccattcccagtccgcccgtaacatggccgatcaaggaatcgaaaaagtttaccaggcgcttggcgatcccgccgctgctcatcagattgcctgccagcataaaaaacgggatggccagaagcggaaaggagtcgactcccgtgatggccttctgggctatgatgattagcggaatatccgaatagtaatagatggcgattaaactcgaaataccaattgcatatccaatcggtaccgttaacagcagcagtacaaaaaaacttccgaataatacaagtgcactcatacgtcaatttcccctcttcttcccttttccccgtgagcttcttccagtctccggccaatacgtccaaaagtcttaaacaaaccagaaatgatgcgatgggaaacgccatgtaaacatagacaagcggaagctgcaatcccgaagatgccgcattcctggctgccattgaaacgagaagctctttaccgttcagcaccatataggcgcagaataaaaaccagataaaatcggcagccagcccaatgaccgcttttaatttctcacttttcataaaggaataaatcagcgtaacacggatatgctcgttgtatttcagtgcagtactggctcccagccatatctgccagataaatatgtaacgtgacagctcctcggaccaggtcagagaatttttaaataccgttctcataataacctgcaaaaatacgagaagcacattacagaccagacttataatcaaaagatactcttccagattgttataaatattggtgaattgagataaaatactttttttcttcatgccctctcctttaacagctttgccttattgtccatattcctcagccattgagaatatttcctccccgaattcagctttatatttctcatacatcggagccagagcctccttaaatgcggttttttcttccggtgtaagcgtattgacctgcattccggattcttttagcttatctatgtatacctgggtatcctgaagctccatctggcgctgctgtttgacaaattcagccgccgcctcggtgacaatctgctgctgttcctgtgacagcccgtcatagaagtttttattaataataaagccaaggaagttattcacatgctccgtgacgctcaggtatttctgaacctcctgcagcctgcttgcatatatcagcgacggaggattttcctgtccgtccacggtattctgctgaaggccggtaaacagttcgttaaagctcatcggcgtcgcactggcacccagcgtattaaaaaagtcgataaagacctgattttccatcacccgcattttaagaccttttaaatcttccggttttgtaatcggacgcacgttatttgtcatgctcctgagtccgttataggagtatcccaggcagtggattcccaccgtttcaagcttctcattgaaataatttcccatatcgccgtccattgccgcaaaagcgctctccgccttgtcaaacagccacggcatatccataatcccgaattccggagaataggataccagaacggaagtggacggcagggctgcctgcaaagttcccattgcgactgattccgtaagctctgaatcgcctcccagggcgctgttcggataaatctctactttgattgtccctcctgatttttcttccacagcctgtttaaaatattttaccagggcctgatgggttgaacggtcctccgcttccacatggccaatcttaattgtgacctgacctgaacctgcttccaggctccctgccgcgttttcccccgaacctgcggctgccccctgagctttaccggtctgattccctgcattcctcccacagcctgcaaggctgaataccattgctgcagctaatgtcagagccgcggcttttttgactctcctcatgatgtaatcctcctttagtttactctttcccataacgataacctgcgcgcacctcgcacaagccaccgccttcaataatatcgctcccagagcggtgttactttgttgaacgcatacttgtattcaacttgtataatctaattatacatatagtatttttaatgtaaattaacatctcgtaaaggttttatttattaaataataaattatgtattattctgttgtttttcattccatattcattattccctaccgccgcggaacgttttttatttaacaggagtactttcctgtcaaacgatagcctgcacgctccgctcacaggtcaccgccttcaataaaaaaggcgttctgcaagccataatatacagcttgcagaacgcctttccaaacaccctgctccgactcttatttatttcttatctgtctgtctctcctctttttcatccgcaatatttctggattgcattctcgatcatcttcgcacacctctttatcgccggtacgtcttcttcggtaaacggcgaaagaggcagtcttgcccggccgatatcaatcccctggatacggaggatttccttcgccacagaatacatatttccatggcagcccgtcatggtgaaaataatatcattgacggcatgctgaatctcccctgccatctttacatttccatcctctataaattgattggcttttaagaaaagctccggcatcacggaataggttccgccgattccgccgtccgcaccaattatacggccggctacaaactgttcgtccggcccgttgaagacagcgaagtcctcgcctccgacacgcttaaaccgttcaatgtcctgggccggcatcgaagaattcttaattccacgcactttgtcataagccagcattttcttaaataaatccatgctgagcgcataacctgtcgttcccggtatattgtagatgataaaatccagatctgttgcgtcaatcatcgccttccagtactgctcaatggaatactccggaagcttaaagtagatgggagggattgccgccagtgcgtccacaccgcaggaagccgcatgctgcgccagctccacgctctctccggtggatgtggccgccacatgggcgatgaccgttacttttccttttgcctcttccatgacgctctccagagccagcattctctcttccttcgtctgatagatacattcccccgagcttccgcagacatacagaccgtctacgcccttcccgatcagaaatctggccatagccctggtacgatcggggcttatcctgccgctgtcgtcatagcaggcatagaatgccggaaaaacacccctgtacttatcaattttacccatttcttttcacctctttgttcttgatattatccggcatctcacctttgaaaaaccggatgatcgtatcggccataatattctgtgagcggtaaccggattccgccgactcagcccccatgtgggatgttataaagacgttatccatcgtgagaaggggattttctgctcctgtcggttcgcaggccagcacatccagccctgcaccgcggagccggccgcttctgagcgcacggattaaatcctcttccttcaccacgccgccgcggcaggtgttgataaagtaagctccctccttcatcctgtcaaacagacgttgatccacaatctcccttgtactgtcattgagcgggatatgaaggctgacaatatcgctggatgaaaagacttcctccatggaatcggctgcttttacaggatactgtgactcatcgggcctgacaatgggatcgtatgccaggatatccaccctgaaaccggacagcagcctgacaagctgtcttgcgatattgccgaatccgacaattcccacggtcttaccgtccagctcatttccggtaatccccaccggccagatattatttcttcccttttccacacattggcagaaccgccttcccaggttcagaatgtggagcagtgccacttcagccactgcggcagagttagctcccggcacattagccacacagatgcctgcatcggtagcggcagataaatcgacattatcaatgcctgctccatagcgcatgatgagtttcaagcttccgcttacctgcgaaagtgtcgcttcattccaccgctctgccgtgctgactaccgcatccgcccgccttccctgttcgataatccccgccgtatcatccgcagacaccgtcctgtatctgacgtcaaatccggcatccgtaagccgctttttcagagtggaagtatccacctgcgtttcctctaaattaatccataccgtttttcccattctttttcacctctcggcaagccgttatcctttatttgatcgactcgctgatctctttgatatcggcattcattttttccatggcctgttccggtgtcgccgcccctgtcacaacagaattgagcatctcagccaccggatacgtaaagtaatgcttgattcccactaccatgccgtccagtgtctttgccggatagccgtaataaccgcctgcattcttggcataagccactacctgggcattgatgccttccttccagaaatcgttctcctcggcatctttgaaaataggtgcaaaaacgggggccgtaatttcgagataggaattctgccagtccttatccaacatgaatttgataaaatcctcagccgtatccatatctttacagctgttcataatctgccacccggtgataaagcccatatgctggctgttgtccggtccgtccggcatatttaacgccacggtattctcaaatatttctttatacgcttcgtcggcctttaatgcattgtataatgtcggggcattaaatacgattgcggattcgcccatcagataggtggtgttatttccgcccggatcccaggttgttgcagacggcggaataatctctttattgtaaagatccgcgtacttctcaatcattgcttttgtcttttcatttggaacggcagagcctccctcttcattgaacagataagctccatagttccagaggagcgtacggaaggtattctcacaatcctcatcagtcgggccgcatcctatgccgagtccgtagataccgttatccgggtccgccactttttcagccacttcgaatacttcatcccaggtctccggatattttgtaattccctttgcttccagcatgtctgttctgacgaacatcaggcaggtagaacttgtgaaaggaacaaaataatttactcctccatatttggctccctcataaacggaatcaaaatagggacgtttttcattgatttcatccaccagctccgtaacgtccacgttcggaatattgggataataattaagcgcccggttgcccgaggtcagcgtaatgtcgggaatattgcttcccgcctcaatagcggcattcagcttcgggacaaaatccgtagcggaaagaaattcaaactggacctcaacgcccttctcctgtgcgtactgctccaccctcttttgcagaaatgtgttggcatcatcgctgaacactttctccagccatactctgagaacctttttctctgaggactgcccggactgtgcctgcgcctctgccttgtctgtctggccatccgccgtcgcgctcttaccgccgcagccggccagcaggcccactgccaatacggatgccgccataattgaaaacaaacgtcgtttcttcataaagtaaccctcctcttttttatgtaaaccgttttacggtttatctttattgatgcggtaacccatgcacagtgcgcaggttatcgttaacctttcacacctccggctgcctgatccccggaaaggaaaccggaagaaagcgtatatatcacaagtatgggcagacatccgatgatggcaccagccattatctgtccccacggatacaaatctccaaagataaggcctgcaatgataagaggaaatgtcttcatactctcctgtgtcacattcaccagcgcatacagatactcaccccagcacatcgcgaaggcaaagatagcggttgacacaattcccggaagcgccagcggaaagatgattctgtacatgaccatgaaccggctgcatccgtccataattgccgcctcctcgatatcataagggattgacgcaatatggggaatcagaatccaggatacatacggcagtgtaaacgtcggataaatcagcatcagcccccagatgctgtcggacagccccactaatgaaacaaaaatgtaaagcgggatatacaggacggatgaggggagcaggtagcagaataatatcgtttttgaaaacatctctttccccttaaacttaatcctggctatcgcataggctgccggataggcaatccctatggaaaatatggtcactactccggcaattaccagactgtttttcaaagcgttaacaaatttcgttttaaacagcaggtaggaaaaattgtcaagtgtcggtttctttggtatcagcgtgggaatcttgctgtatacctccccctgagtcttaaatgcggtattcagcatccagtagatgggaaataaggccgccagaagaaacaggaggatcataatccggtgcagaatctttattgctttgctattcatattcatcctcccgtctattcgttatttaatgtcttcttactgataaaatgaatcagtatcaggaagacaggcattgcgagaactgaaacggctatactcttaccaagctgcatacttgccattgccgttttgtagctgtaaacattcataacctgggtggagccgtttggacctcctcccgtcatcagccagaccgtttcaaattcgttgatggtccagatacatgacatcagagttgacagcagaagcgtatcttttatctgaggcagcgttatgtagaaaaagcgctggaaaacgcctgctccgtcaatcttggccgcctcatagtaatcgtccggaattgtctgcagctttgccaggattgaaatgccgaagaaaggagtccccctccacacattggcaatcacaatcgtaatcagagccagcgtcgccgtcccgaaccatacgatatctttttcaatcagcccggcgcttttcatcaggtaattcacaattcccccggtagaggaaaacagccatttccagttcagaacggctaccacgttgggaagtgtccatgggattaacagaagcgccctgaccagattcctgcctttaaactcaacgttcagcatcagagccatgacggttccgaagaacaatttaaatatcagtgagaatacagtgaacttcagggttaccataatggagtccctgtatgtcgggtcttttaaaagcttaatataattcgtaaatccgataaagtttccggttcctccaatcgccttattggtaaagctcagcccgattccccatatcatcggaccgaacagcacacagattagatatactgctatcggaatattaattagatagggaaagctttttttcttaaccccttctcttctttctcttcccattccacacttctcctttttaccttccttatttctttattgttttccccgtattatgtctcctgtgtaatcttgttttgactgcttcaggttgattttactatagcacaagcaaaaatatttttcaatacatttaaaaataaaaaaatattttttatttttatcgtaaacgatgacctgcacgctccgcgcacaggtcacaaccatcaataatacccgcagatacaaaaacaacgggtttcgatacgaaactgaccttgttctcatctgcgggcaaaataattcccggtaaatttctattatatagtctgtgccgatccggcagcggttatcatgcgcgctttccctgctgctgcccacgctgtccggcggttacttcaaaatccagagtcccccgcccggcgccgttcacaataagcgtaaccgaatgggttccgggataatgcgttctggtacttgcatctgcaaaagaatgtttttttgtgtaagccttcctttcattttcctttaaggacagctcggatatctggaatatcttacggcttctgctgccatttgcttttacataatcaattccgtattccagacgtatcctggccgctttatgggcctccaccgaaaaggaaaaggtcatattgccgccaatgcaaacagacgccgactccagtgcaaaaccctctgcctttacacagccggcatcggcaaacccaaagatatccagcacatccctgtttccctttttaagcagcgtcctgcagccatgctttacaatccagtccgtatccctattgttaccgtaccatttctttgcaatgtccgcaaccaggccaggatgcgtcttggaaatgtcgttcaggttattagccacgcttttacggacatagagcgacggatctgctttcagccgctctaaaattacgagaaccggcgccgggtctcttttaaaaccggtcagggcttgtccccacggcagccgcgggcggcaaccctcactggcaagccgccggacatgttcgttgtcatgtccggcccaggcggccatctgtgccatcatacgctcttcatggtttatgataaacggcctcacggcaaactctgatgtggagaattgtgtataccgttccaatgcatcaatggacaaatcccaataactctcgtcctgcccatacatctccacaaaatccggaaagtacattaatgtaaagtcgttaaatccatccggatatcccgctgtaaccttgtcaataatgccaagcgcctgctcgtaatcatccggcagatatcttcctaaattcagggtgatttgccgcatgcgggctttcagttctaacccctcccatgtttcatccattataccgttcagaaaatccttcacctgaaatgaaggatatacggctctaatgctcaaagccagctcgtaaagagactcatcattatatctgtttttcagtaactccggcatatgtttccccccttggagctacgctctagtacagtttatcgagaacggcgccggatgttttttggttattctcacggcaattttcgaaatgcctgcggtaatactccgtatataccaaatcaatcaggaagagctggctgatctccgctgaagtggaaccgccctgcagggggccttcattcgctccgcaaagcagcgtcacatcggaaaaagatgtcaggggtgattttacaaaacgtgtaatgcagattgtgctggctccggcctttctggctatctccgcaacctggattgtatcttttgtggcccctgaataggaaatcatcacggccgcatcttccggccccaatgtagccgccgccattgcctgcatgtgggaatcctgcagacagtaaaccttcggctcaatccgaagaaatttattcatcgctttcatcgccgccagtccgctggcgccgacaccaaagaaatatatcttcctggccttgtccagaatatcgatagcgttctcaaaggtctcgcggtccagaagggagtatgtctcctgtaaggctgaaatattggtgttcaaaaccttctgcgacaattcggtaaatgtatcgtcaagctccacatctccggtcagttggctgtgctttttgcctccgtcgccgagatccagtgagagcatcatcttaaattcctgataccccttcagttccatcgtcttgcaaaagcgaaatacgctggtgtcccccacgtcacatgcttccgccagatctgtgatggacatgaaaagtacctttttcggattctgcagcacaaaatccgccacctttttttccgcctttgtaaattgatttgaggaagattttattttagtcagaaattctttactcatagatttaccaccctgttccgctttcatgtgctgccatccggttttaatcaaaattttctcttcaaacctgccgcagtcctgcttttttctctgccagccaggccgctccggtcattccggcgcggttgccaagaccggcttttcggatcacggtttttgcatagctttccatgatctggcttttcaccctcttctccacttcccgcaccagataagcctgttccatgacgcctccgcccaggatcaggcattccgggttaaaaatatggatcaggctgataaggccgtatacaatttcgtcaatccatgtatctattatatctttaatacggggatcattcaactgtgcaaacgctttttttccactatttaccgaaggttccaccttggataaacgctgtaccagagccgtaaccgatgcatatttttcataacagccgctaaacggctcccctcctttctgtcctccgggtgaactatcatacctccgaattctccggccgagtaagaactgccgcgatacagttctttgccgagtataaccgcgcctcccaccccgttccataggttaaacagagaaaatcccgaaacccggcgcccgcaccgaatcgggcttcccccattgccgccgcatttacatcattttccacggtaaccgggattgaaaattcttcctccaggattttcttcacatttgttcctgtgtagccgggaatattatcattggcatagagaatgcttccacggccggcatccacctgtccggccgtactgattccgattgcccccgtttcatccccgcacagcaaaccggaatgaagaatttccttcacctgtctcatgagcgaggctcctcccagtgataaatccgtcggatactccttgatctgctccagccgggttccgtcccagacaccgctttttatcattgttccgcctatatcaattgctgccgtcctcataccacgttcccttccgctgaccttttttctgtatctcttttatcctgctcccttttcctttatgctctgtctaaggccgtcagaaaatgtctcgttatctctctgggcctggtgatggccgtccctaccactgccgccagtattccggtctccataaccgctttaagctgctccggcgtccagattcctccttctgcaatgacaggctttttaagccctcccaccagactctccatcatcgtaatatccggcaggcttttaccagccgtataatccgtatatccgctcattgtagttcctatcagatcaaagcctatttcctccgcatgcattccctcttcgtaagtcgaacagtccgccataaaaagctgctccggatattttttccggacacggctgaaaaagtcatccaggctttccccttggggacgcatacgaagtgttccgtccgtagctataatatctgcccgcaggcagccagcgcatcgatttcctccatcgtaggcgttatgtacacggaggagtctgcatagacttttttgataattccaatcaccggcaaatctaccgtcttttttatttcccggatatcagctaccgaattagcccggattccgactgctccgccttccatcgcagcataggccatcctcgacataatataggagctgtgaagcggctcctccggatgtagcttttcgcgcaaaatgcaaaatattttcgcgtcatttgcaaaaacctattttaaaaacagaaaaaggacgttttaaagggctgtaaaataccctctaaaacgtccttttcctactgctttttcttcggctttcggtttccatgctcttcaacaatcagatcttttcccgtgattttgtgctgattcggtacatattcaattagatctgaaatatcgcactctaatacttcacaaatcttgtcaacgtgatccaggtttatacgggttacgaattcgtgataccattcgttgattgtacttggccggattccagtggcttctgcaagatctttctgcgtccaccttttttctccaagaagccgtgataaatgaattttaatcatgatatccatgcccctttgctggttattctagcacgagggcactctttaaaagtcattttgttatattataacgaaatacgttatttttcgtaattcctgattatcagttccttgaattccgaagtcttcgtcttacccgccaggctgttattccggcttatttcttcgatattgtaacccttatacagttctctgacgtaagcatcatcattataagataaaataaaacggcctttgatactgcttaaaacggcttttaaacgctcatgatccgcttcagcgaagcttccctcataatatttttccgtcccatgataaggcggatcaagataaaagagtgcccctggtctatcataaacccgaatcaggttttcaaagtccttgttctcgattacaacactctgaagcctcttttgaatgaggggaaggtactcgatagcattagcaaggttctttttattcgttccgaaggttctgcgatctgaaccaaagctcacctttataatatgaaagaaccgcgccgctctctggatatccgtaagtccctgactgtcaagctggctcttgctgtcaaagaactgttcccgcgatatagtcagccattccagctctctctgcagttctccgcaatgatacttgatgcaccgatataagtttatcaagttgctgtcgcggtcgttgaatacctccagttcttttccctgctctttttcaaaaagaacccatccagctccaccaaaaacctccacataccgtgtaaagccttcttctggaaacctttttacaatctcttttctcagtaatttctttccaccgatccatgcaataaaactattcattatgtcctcctgatttcaattttaagggcatgaaatcaggatgctccgggagctcgtactcccagagccttcatttatctaacgttttaaatacgcactgctacagaagcccgtgtaagctactcccttcacagtagtctttacataataccatggctttccgttgtacaggctgtaatatccataacaggagaccgctgctcccttcggaattgtaaccagaatatcttttgttgtaccggctcccgctctcaaattcagatctgccgtggttttataggttccactgatagatacatcctttttctgagccgcttcaacttttttattctggctgctcttggagccattgtccagaacaaccacagtgtggcctttcgtctttgtgaccaggatatctcctcgtaacaaatagtctgaagctttgcaatactcatctttttccaggatatcaaactggccagtctgcctcagtgctgccacctcattcgctgtgctgaaactattcacatgaattccagcataaagcacacagcaacgtaccaattcagagcagtctgtttccacggctgtatttaccttggaaagatcgtaatcatatggcttcgctgcagccgttgccgttcctctgtggccctggcaataaccgatattgtcattctggcaggcagcttccatgtttttagcgattgcctcccggactgcaggtgccttcgccctaataacgatccagccctttgaatgcagataccagagctgcgttgacacctctctgccggtctgatcgcccgccttgccaccatttactccaccattttcattgcttcttgcgcttccaactcttactcccatgttgactacacctccacatcatccgttgcttcaatcacaattcctgcattttcctgaatcttcatctgttttactgcggcttcaatcaggatctctatctgcgtgtccgaaagtgcgatgttcttctcctgaagaagctcttttaaaaactgcgtaacgatggcttttttctcttttccatcagtggctttcatggtctgctgggccattaaaaccgctttatacgcccactgagccaccaggttcaacttctcggaatcagccttgctttttacccagggaagtacatatctggttaataccagcaccgccaccatcaccaaaatctttaaaccttcaaagcaaatatcactcattctccgtttcctccatgctttcttttttgtctgtctccctatcctccagttcatactgtctggaaaggtgtctgtctttcgttgttttgatccagcccattactccgcattctccgccacatacactaaacacgcaggtacataaggtatccggaattcctcctgttcttatgtaaatagcaatcatcacaatcacaaaaacaagtaaaaatatcgccaggattacgaggatcacatccatggttttccacttctctttttgcatgatcttcctccaattaaaaaggcacatcggaaatatccgatgcacctgtttttaccttattatttctctgtgagcttcatccatatagggaagttctcggcagccgtattcagctacgttcatttcctgatcgatagaatccagcttctcccgataataattctttacttcttcagaaacctggttcatatgttccagatctgtcaccagctcccggaggagatctgcctgcttggttgtcacatcgcaaagcgcgtctataatatgaagcagagtcatgtttcttctcccttcctatcattcctgtttttccgcttcaatagccgctttcaccttttcccggaaggccgccggtacgctgtcaagggttctgattccagctttaactaaggtcacataaagttctaacatattacacgcctccattctctttttcatacagatctgcaatggcctgcatgatgactaactgatttttttctgtctcaataagtttctcatagatatctgcctgagcggccatggaagtcagcatatttttattgctgttttcctgctccagggctgcaaaatattcttcttttgtaagaatcctgtactcacatgaataacccttatcagcttctccgttcccgtcttttctttcatacggagtgatattgcgtctctgaatgtaagtaccttttccaagctcctgaagggtttcaggctgctctctgcagagttcctttttccattcctgcatgacgatttacctcccttgtcatctttgaaataatccgtttgattttacggacgtttaccaattccttaatatgtatcaaataccagtcatacgtttctgaatgtgtgatccaccccagcaacgatacaaagccacggcaaagccccagcggaaaccgctggccgttttcttcctttttgtgcaattttcgggctatgcgctctacatgaagtaaaatgtgctttcggatcagcacttttgagcggtaaaacagccaacccatggccgacacgcagcgccccgttttcttcccatttttcttggtatattcaaatcggaacacctgccagtcattcttcatgcgtaatctcatctttccaagcgcctgccgaatataaagcaatgcctggtgcagcttctttttgttgtcatcagccagcgtataattatccatataccggacatgatgtgcgattttcagcttacatttaatgtcataatccagttcctggagcatgaaatttgcaagccattgagaaaggtagaaacctaaaggcatttctttaggaaaatatgtcatgcagacatcaatcagatgcagaaaaaagctgtctttaactctacgctccaattttttccgaacaattttatactgaatatggctataaaaatgccggatatctgcctgtgcaaagttcctgatcccctttccgctttcgatccaacgtctgatagctcgctgccccttcagggaaccccttccaggaaacgatgaaaagctcatcggatagctgcttcccgctatgatcggttccaggatcattactattacatgctgaatccagagctccaccatagtcggtacataaacaacccttgtctttccaaactctttaataattaccgggttatgctttactggcttaaatcgcttttgaggatcagtctgccatccatccggctttgtattcaggataatttcctggattttcttaacccaggtatccagattttcctctgccatttgaaagtcttttctctttgttttcccttttctcatacgtttaaaagcctttttaatcacatcttcccggcaggccagccgatacaggtatctataacttttctttttcttccagggaatcccggtcaccttttcaatatcgtatttcaatatacgcatgatcttctatctcctcgccgctttcggacatttcctgctacttgcagctcctgaccggaactatttccactcaccaaaacccataagggcggatataacgatgtttcaatcgtctgcggtgtaggattaccgggaacattttggttgtcgttctaaaattgatagaaaaaggacgcgccgtagttccaccaggcgttagcagccacattgttcagtgtgcgggcccagaggccgtcattaagaccgtcattgcaattgccgaaccgtagcgaaaccgccggaaagggtgttccggtaacccctaaaattcgtttattccctgcaagggcatcgggggaaatccccgaaccccctattttctttatgggggaagacccccataccccctaacagcagctcacgctgctgcaggtgctggaagaagtaaggacgcgccggcgttccaccaggcgttagcagccacatcgtccagtgtgcgggcccagaggccgtcagcaagaccgtcattgcaaatgccaaaccgacgcgaaaccgccgtgattgtggcgtttacccaagtatgatcacaatagccagttgcggaagttccctcaatttcctctgacggaattgctccaaaacctttgactacatgcatggtcgcattgtaatggtttgctgtcacgttgcagccagtatccagatacccgtctccactcagattgtaggtatagtctgtagataccttaattcttccattgactgcgaccatatatggatcacgctgccaaagcatataactgcccagaacagcgctatgaaaaatcttattgaaagacttattatcatctgatccataaaactggccgcctccaactaccttgttgatctgagttccataatgctgggctttatcctctacatagctggagcacattccgcttccaaaagaactttgtgaatctgtgcttcgcgtaagcattacacaaatatctgctaacgtatttgtaagcgggccgccgaagaataacccgtttgcactcgttttcaaaatcgctgtgttctgctctgtagtgcctattgcggttcctgatgaattatccgaagagcttcctgaagcagtcaggcagctccactggcctgcaatacttctcatccttccatttccatcaatagagccatagaacataggaatgagcatgtagtccctaacttttcctttgacattaaagccaacaggctggaaatccggatcaacctgccgctcgcagaagtacacataacgatctgaaccgaccttatattcctttttgtagatcttcttaatgaccgccatggcatttcctgcaaaatttgcatttgatacatctgaagctgttccgtctgctttcttcgtataatcatccggattcagataatatttgatttctccatcccatccgcacataaccggcacattcgcttttaaccagctccaattcgcccaggagccataatccatggcatgagtagccatattcatggacataggcttaaaatccttgttagcacccaagtattctacacgggtagctgggttcagatctgatgcttcgtgaataaccattccatagattggtgcgtcagtagggatcaggttccggatcagcttctctgtctgctccttcacttccaaaagggtttcctgctccgcaataaaaaccttattttccgtcattttttccctcatttccagcataatataacacgatgcgtcatatttttgcttattttgttattttataacgtatcccgttatcatataacgcaatccgttattctccagtatcatcagcttcttccgaaggaagctggacatagtaaagatgaccattttccattcccaggcggatcttcgctccgtttttgtcatcctcataaatcttggcatccacctgcagtgccttgtcattttcaagcagctgctgatagcgttcattgaacctgtctgcatgtccaggtgtggatgtcgtaagagcctccatctggaggtttaatgttggattgtccttaatcggtaagttagccattgtgttcctcccttaaaatgtatccttaatccagaaggtcatcgcaagatccgcatccttgcctttagccgaaaaccgcttaatattaacgatatcaccattggcatcatacaagccgatctcactgatctctttgcccgccagctcctcttcggtcagcgtacattcatacttgcattccgtatcgctgaccattgtatagctgtcatacttctttctgagaagttcatttccgagggtgctgtctgtttccgaaagaggaataatgttcccgctttcatccacaccaccatcaccgaaaacaaaacctacgattttcgggagctggatttctccggccctggctctaaccatattttttcttgctgtcactgtgatgatctgattctgtgtcatgtcaattcctcctcacgcctctcagcgtccaatattctctttccgttcaaattttggctgccatccaggaaccataaatccttatccagccgaacatgatagtcattttcctctttattttctatctttccaaagtcaaagtgttgtccgtactcatgtgggtgtctcagaatttccagaagaacagaaccatctaatttccatgcaccgtttaacgttggaacttgccagaactgggattcaaagcccatggataccatgccgacagtattctcctcttggcagattgctgtcataaatctggctgcctccgtgaaatcctcatgaagttctatttctccaatttcataggttaagccgtattcatctgccttacggactgcatcaagattgtatgtaccgtccagcagccaagctccattcaatgtccgaaccggccaaaactgtgcttcataacccagcgccattcctgtcacggtatatttttccgggctaatatagccactctctatcagtaaaatcacacgatatcttaaatgtgctggcagccatttgtccaaaaatgcccggatgtctttcatatcaacacccacaattttgcttacatcaagcgttatcattgccaggagcttgtccgcgtctgtctctactgtggtatcagctcctgttcgggcatccagtttttccttcagccaagcctcattgaccagctcctcatggagcagcgccgccgccccatacatttcatcaataattctttctatctcgatcaggattatatcttccacattcagaagatcttccatttgtctcatctttcgcactctggccggaagcatctgttcactattcagtgacactgataatcactcccttcagagaaaagaacttgttgtaatctgccgtgatagaatccttttttccatttattgttaagtccaccacctcggagacaccattcaccgcgctgatgatattgctgaccttaaagaagttcaaagagatcactccgctctggaaagcaatttccaggaaatgtgcctgaacatctgcctgaatctggcttttaaccgtttcctccgtgtatccggctgttttgtgaatctcgcatacaatggttacatcaatactctctgctgcagataccaccgggttagcccccacaggccgtttcgtattgatatactcctgcacaatctggatttcttcttccgtaggtgcctgggccgttgtggaaacaatggcgatatatacgtttccagttccatcccttggactagaaacttttgcatttcctgccactcttttgccctgggcatcggttgcttccttggcccatttcacataatgtttttcatttccactggttcccatgtcacttccttgggcagccagttcatcctgcaggggagcaatgagcatcgcattaaaccgggccagttcttcagataccgcctgcaggttatccattgtaaagcttccctctatcctggaatcttcatttttcaggcttcctttcatcctggccagaattccatctgccgtaaaatccatttatacattcaccccttccattcggatcggtaccgtttctttcccgtaaatgctggtacagtcaaatgttactttcattccccagctactggtctcaaaattaaaattttccagtttcttgatatacggatttaccatcaacgcttcggtaatatagcgcttcatttctgactttactatttctccgttcatggaatgtccaatgagctgatcctcatattcttctccgaaggccggagaataggctacgtgtcggaaccgggctgttgtaagtgccttaaatatccagatccggagtgcagcatttccttccaccagataagtgcagccattttcatccagaagcagttcatttttcgcataatcatacgcatattctttcagtaatggtaaatcagttacttttttcgtatctgttaccccagacgcatcaataaatggaaaaatgctcatcctgccaccgcccttccagctatataaaagccgctacctgtcatgacaaccaccaccgtatcacctttcttgattacatatttttcatggaattctttcaaaaattcatatgctgcagccggttcaaacggtgtttcaaagggctttaaaatctcatcaccaccatccgatgccgctaccgtcaatgctgggttgatgtaaatgccagcagatactgtctgcccctgcagttgaatagacaaaggcttcacgctgatcacatcagccaggaatgttccatctacgcttgcctgaaccccgccaccggagtttatatccgcagctccgccaccggatatacgttcttcaattgcgtgaaccattcgcacgatgttatgatctgtcatgtcagtccctcctacttacttttcttgttgttcgtgtccttctcgatttcctcctcatccatcagattttcaaaagccagggtaagatccatttgcgcttttccattggtaaaggtatgagtatcgctttctatgtaaaactgtccatacagtccagaaacttcatcctggacaataatggaatagccagagaccgccctgaaatcattcggtactccagatacagatccagaattttctacggaaaccagcgctttttgtgcttctgcagaaatatcttctttatcgctctgtttcataactttctgaaccaggccatatttttgaatggactccgcatcctctatcaccttgatctggtttcctttgctgttcgtgataatgacacggtttaccagattctgcagagtgcttttatactctgtatcaattaggttgtagtctccggtcatcacagctccacacaacgtccccttttcaatcacgcaaagccgattgatatttttaatcagaggaatgtattttgtaccattcttcctggccgctactgtataggccatcatgattgccttatatgcctttttcccaaaacacggtgatttcactacaactccattggtcggagccagttctccgcagggaatatccagcttctggcaaatctgcgtgacaatactttctggtgtcccagaaaagaccatattcacatcagactggttcacgtaaaacaaaagatcatatgccagataacttaccgttttagagctgcctttcttatccgcatcaaatatgatcccgccgaaaacattgttttctgcatcatcctgcatgattatttcatccccgatgtcaatggatacatccgggaacagtgtatcttttttgttctgggcaatagtgaaattgatttttcttgacacctgggaagtatctccagaccaagtgattttttcaattagctggctgatatcctttcctcctgtcagtaatttcattccttccaccgcctttatgccggaattgaaagcacagtgcccggataaatccagtgcccgttcccggaactactttttccatggctcttggctgccgcttcaatcgttccgctatttgcaccatatatcttcgtatactgtgccccattcccataatatttctttgcaattccccacaaagtatctccgctaaccaccgtatggcttccacctgcgctggtattgggccgatctgtaaggccattgtctctgacttttggcattatatttaccgttgggacgttcaaagtaacgtactctgaaaaagacatggtataataaatatcctcgtccccttcatttacagaataattcagttcatctatcagcattgccagattgatatccatgtccgttacaataacgcgaactacctttttcgatgttttccactcatccagcatggtgatgtaacctttcggtgtatcttcggctaagtcactgaacggagaattctctgacgggaaaaagctggaaaactttgtgcgcttcagcccacggtctcctgccagattgacttctcccatttccaacaaagttatcgtctgatttaactgttttgacgtaaattccaccgttttagggttaatcgggagctcgatgacttcgctccgattatccacgcttagttcaatgatcctctctttcataagctccctcctatcccatatttacaattacttctacaaatttctttgctactttatcagccatctcatcaatatcatcctctgaccggacattgatggtatctgcaagtttggcaatctggactgtgatgcttccgaggaatcctcttgcgccaccggacgaagtgctgcccggtacctccatgccgcccctgctttccctgatccggtcgatcagagccgaaagatgctggtcaatatttgttaaaatgccgataacagaggacattcctccgccgtttccggaggatgctgccatgcttccctgcactacgccaccgaatgcattgctggtcagagacacactttccttgtttggaagtatcctggaacctctcggcagatttacaagttctggtccttcctcacctacccaagtaagtccaccacgccagttgttgtctccagccgcattctttccaacgtttcctgatctgctgcctccagagcctgcaatcttggctcctgtgctgctgatccagtccgccaccttaccgatagctgagccgattccttccacgataggctgaaccacgctccagacgctctccaagatactctgaattcctgggaatacgcgctgtaccacgctgaagacaagctcgaatacactaatgcacaaatccataataggtgagatcacgctccaggctgtggtcaatacagaaccgattgccgggccagctactgcgataacttcctggatgaagcccatccgctctccgatgaagccgatcacagaacttactttctcaccaatgccatcgaatattgtactgaaaacaggggcaagcgccacaacagccacaccgatagccgacaccagccctgcgataaccggcgatgcctgagagatcaggccactgataccagaaaccacacttgaaatcaccgggagtattactggaagcatagttgaaacagtgttcacaatgcttccaattgctggggcactggctactgcagcctgaccaagggaatttgttatgctctttccgaaagatacaagttccggtatagccgctgaaaacttggaacccaggtttccgataccatcaaacgcctggttgactgcgccgctcatagaagatggcagtgcgctcacaattccgtctttcaggcccttgacgatttctccaccagattctttaatcttcggagcagccgcctttatacctgttttcacagctccaggaagcgcttttacgactcgtccaaccatcggaaccgcattcttgaacaggaacgtgctggccgtctccactacagagcccatagcgccttctacatcaccgccactcgccataaagccaagcagatttttaactgcggacttcatggctccgaaagatccgctgaatgtggtcgatgcttctctcgctgtggttcctgtaacatccagtttttcctggatcacatggatcgcgttatacacatccgccagattatccaggttatacttaactccagaaattttcccagcatcctttaacagacgctccatttccgacttcgtaccaccgtaaccaagtttcaggttatccagcatggtgtagttctgcttggcaaagccctgataagcgttctggatagaacctatgtcggtaccgaatttattcgcgttatctgccatatctaccatggcctgatccgccactgtggccgcttttgccgtatcaccctttaaactgttcagcagcgaagctgaaaagctggtgacctgctccatataatcatttgctgataatcccgctgtttcaaaggctttgtccgcattcgctttgactgtatccgcatcatccttgaataaggtctcgacaccgccacggctctgctccagcttcgcaccttcgcttaccgatgctcccaccactgcagtagtggccgtggccgctgcgattgcaaccggtataacaaccttggttcccagttctttcatttttccgctgatagcagaaattcctttgccggtagcatccttgatcttcactaccggctcggcaacctttttcccaagatcttttacacggctttctaccgctttaactttcgttgtggccatgtcctttacagccatggccgtcactacttttttccggagcggttccattttggacttcaagctattcagtgccttggttgccggagttgcatccagttttgcctggtacttttccttccaggttttctccatctcctcacgggttttcttaacatcctcccggaaagaagtttgttctttctttatgatccggagagttgccgtgacattatccttaatgctaatacttcctatcacactcatttgtcacttgcacccccgttcccttcaaaagcaaacagctttcttctttcctctatggccgtctccatggaagcaaaataaaagagcctttcctccaggctcagattcaggatatattcaggtgtgattcccttctgcagataaaagtgcaggaaataggtttctccgtctcggcttatgagttttttaattcttcaaccacagtgaccttcttatttccgagtacaccggaaagcttcatgatctctgtagcgatttctgttatctcgctcatttcaaagatattcaccacttccggatatgtctggatcagtccctgattcatcatctcctgtgcgacttcttttaagttcggttccacaacggccagataaatcgtatatttatctgccgcattcggatcgttctcatcttcgatttccgtacactctacgatttcaggataatccaggttgcggattttaatattttcatccaagctcggaatatgtaatgtgcggtattttctgacctttttctcctgaaagcgcttgatcgccttgttagtaaaactcttaaatacctcgctcttatctttatccatgactgtttcctcctcttatgctgcaatctgatccaggttctgcagatcagacggtgtgaagccgatgctggtttcttcctcgacaattccgcctttttcccagttgaccaccggaagttcagtgtgccatacattgttagctgaccagcgctctgtctgtccattcacggcatccggatctttcagttttgcaataatctggcagcgcacatccttgcccttcttccagctttccaggatcgcttttgccctggtataaaccttttttacggtataggagccttctccctttaatccggtaatcttagagtccacatcaatgccgatctggacatcttcacggttggccgttacctttaactcgatcttagaaaattcaaagattttctcgccatcgatccaaagctctccccaggtaccggaaagagttttgttgcctctgatactctctgccattgtcattccctccttacatgtttactgtcattttcagatcttccatggcatccacaaatttcacgttgctggtcacaaagaccttgcttcccgtatttgcttcggccaccgccgtatcatccatttctgatgtgtcagtgccccgtccttccaggtaattcctctgggcatctacatctacagatacggtattgtcataactgcgatccaggacatccccaagaagctccttatggtaagagctgatggctgccacaaacatctgcttgttgtcatagtcattgatgactttgcccacataatacttttcaaatgtatcccggatatcatccatgtagagatccatgccctccacgatcttgatcttccgaaaatcttccgttttagtggcagtaaaggaagtcaggctgttcacaccgcgcccaatcttatactggctgccatcaaaggtaaggatcagttcgcctgcatcgatccgctcattcggatcatccggcacttctgccgaagaaacatcgttcaaaacataaaaggtactgcttctggaaagagacagtccagcaaggattcctgcgatccgcgcacagtattccgctgcagtatgctttttcccggtaacagatgaggtaatgttctctgtggtaaagttgataattccctcatgatctcccgcataatggggaagaactaccttgaaggtcttcttttcatcattgcggtactgcttgatccaggctccgatcatcgtagtatctgccgccttaattccagggatgcacagataattccattttaagtcctttaacttcttcagaaccgcattgtagctttctacattggtggccactctcatggcgatcacttttgaaggcgctccttcatagatcagcttcagataattgtagttatcctccgtccactgagtgaaatccacatcatccactttgttgtaaacattctgttcttcaccttccgtgtcatctttcaagataaccgccacaattcctctggcactgcgctcaatagcactaacgccttttgactggaagataaagttaaaatttggtaatcccagactcatgtttactcactctcctttttcagtgatactcccagctcctccatccggtcatttgtaaccttctgttcttcggagtgccggaaattgatagtaaaaatgtagtggagaacgtgatccactacattgatgtccgcattcccgatggtgatcttcctatcgccaaacgaaagcaccggacgaatggctgcgtcaatttcagcagctttaatgagataagtattattgctttcacccttctcatggtaggtaacatccaccatgacgctcatgtccgtgtaaatcccatccacagttacaggactccctggcttcaaatccacaaaataccaggttttaggctgttccactccatgggccgggtctgtacttttgatctcttcaaaaaagacatctgtatccggatctatcttctttaagacacggatcagcgcgtcttttatctgcaatactggattttccatcatttctccttaaaccaaatcatgcgtatttaaaaaatcagccaaccaggcccgcaagtaatctggaagcttccgatccatttcctgcagagacacctccaacatatgagcgccttttttaaagccgccacccttcatgcgatgcccatactccacaggctccgcatattccacattgttgtaaacctcaatatagtaggtgtctccccgcttttcgatagctcccaagttccaagcatcccgtaaacgtccggtctgaaccggagtcagttcttttgcttttccaagcgcctgctccgcaatgtcaatgaccatttgcttaaattcttccgggtattgccggtctatgatctgggccaggttcttttcccactcgttcaatccgtcaaaggtatattcggtactcatcagaccaccggatcatccagacgaactggaacattattgtgggatggctgccgttcagcagctccagccagagcttctatagcctttccaagtcgtgaaatcaccagaaaatcattttccaggatgtcgatctccggccttacaaaaaggctgtaggaagtatctgcagatgccgtggagctgctctgggccaatgctccgccgctgtgagaagatagcgcacatggaacatcctgatacaccatcttcccttccgcgccgcttttaaaaacgctttcaccagatggtaaagtatctttaaaaggccggtaaacggtcactgtatcccagtaggtctctgccagaatatcagcttcctgcatggttatcctttggcaagcgcattttcttatagtggtttaaggatgtctcataattcttcatgaagtccaccgtggcgctcctggaagcgcttggatcgcggtaagaaatcgttgtgtctccacgggtgacggatgatgtttcttttcctgtggagaccagcagatctgcctttaacatatcctcggcaatctgggctgcagttccttccaggcgttccggaagatcttctctgcagcagtaaatcaggatcttatctaccgcccggcgcacatatctccttgcggagctttcttccgtttctgccattttcatgttatccatgacttcggctacaatcctgttttcctgttcacttgccatgcagtccctcctactttttccttgctgtctggcttttctcagcagtttcctggttctgtttcagggccacttcaagctgatctttcgtgccgtccagttcctgtttcagagtggcattttctttcagggccacctcaagctggtctttcgcaccgtccagttcctgtttcagcgcagcgttctggcttctggccgccgccagttcctccttcagttccttttccgctgcaggtgcttcgttttccagagtcgctttctttgcggccccttctctgacaaatccctggctttccaatgccagcgctacaacttcagactctgtctgttttactacattgtcacgtcttaaagtaatcatcccgtatctcctcctatgacagttcttcctttacgttggtaaagcaggtcttgatctgctgatccggaatccagatatcatggtacttgcggtaatccatcgcgtaagctcttgccttctggtttgtctccggatcaaagattctcatcttatctgtcttagacaccgcaacaggggcttttctcggtgtgatgatccagttaatgttcttgctggatgccgttgctgcaaatccaccatcttcctgtccgctggtttttccatctttgaacagatattcagtcttcattctctctggaccaaccgaaatcagtggatgctgtccatccaggctcctaaccttaaagcttacatctccctgcttaaaatctgttacatccagttttttggacagcttatcactcatggagaggatcgctgccaccatgcggctgatggtaattaccagcggagtattatctccaacgatttcctgaaccgttgcaatgtcgtagtaaagtttctgcagaatggtatcctccgccggtacatatccgccagatgctgtctttgccttgatgcaggccgccgcgatcgtgctgtaacggtaagcatcaatctccgggatcactttggttctctggaattctcccattacagtagccgcagtcagtgcaaagttggtctcatctacggcattctcatcaaagctgaaggaacgtcctctgtcctgggtcattgttttggtctggtacttgaagtttactccaccggctacaaaaccgttctgtcgatcataatcagccaggccgtccatggaaagctccgggatcttgacctctgatcctccgttatatttcaccaggctggaattgacttccatccatccggaagtagcctgctctactgcggccttatccagttcactctgaatgaccgctgctgtctgaattgtatttacgctcatgtctcatatcctccttataatcctctgatgtttcttgcaatctgatctcttaacatattttctgcgcttgccgcattgccaaggcccgccggagtctttccgcgaagtctggattccaccgctgcctgaaggcttcccttgaaggtatctgttaattttgacagactcttttccatggcctcctcactggtataatccagcagttcagccaggccgaccggataaccatctttttccagggatgccgttgcctttttctgcagatcactctttaagagcttcgcctgcagttctgcgatctgctcgtctttctttttctgttcctcggcagccttttcctccgggcttaacttggcctgtctctttgcttcttctgcctgagcttcccagtcctgctttgctttttcaatggctgcatccatatctgcctggctgaaggatttctcctccgttttacctgcaggcggctctgttcctttttcagcagccttttcttctgctccaggttcctttttctcctgcttggcaccgaaaagaccgtcaagaaattccttaaaggcagatgctttctcctggtttccggtttccgcacctgcggcctgtcccgccgctcccgtagatgttcctgccgatgtagttgctgcggtttcagttgtctgagtgctggtggtcatttctccatccattttcatgtcctccttgaatttttgtataacaaaaacaccctctaacgctggttaaaaggtgtttaagctccatttaaatgtaattttttgtaatttaataggcaccccttcgggtgcccatcatgctttctttttctgcatatctctgcaaaaatcctctttgtagttgtttgttcccagagccgattgccttataaccgctcccggtatcccatccggatatgtatcacattttgcatagccatgatatctggtgcatgagttacaggcgctgtcaaatgcctttggtgcttcccaccaccgtctatcagaatatggtttcttttccattacaactcctccatgtagattgtatgtccatcaactctggtaacaataaatgatgagccacgctcaaaaagaatttccttctctgtcgaattgtactttcgtatatctcgaccattctttgactgaattacatactgtatttggaaactatcatcatatacctcggttgaagatgataaatactcattaaagatcttcagttctcccggaacataagattcaacaaactcatccacatccagaattccgaaatctgaaagcgaccgttttaccgttccctcatacttcggcatcttctgaagtgcggaatccattgcctttatgtactgttcttcctgcttcgtcagtttttctcccctgcggagcttgtcattccaaacgtaagaagaactgcttatgtaactattcatagcatgttgctccgcgtctgtcaacggttccgcaggctcttttgccttttcttttacatagcgttttttccattcttcaaactttggattgtctttcaattggttagcgccgtccttcagtgcaaacatatcaatccgtggctttgctctggtagtacatttacagttcgggtgaatcggtggcagattgactcccgcctcggcctcagataacttaaatgcctgaccatttaaagcctggcatatctcacagccacctcccaagaaaatgtattcctcaattccaagctcctgataggactgtatctggccttgattagaaaagtaactgctttctgttctcaccaggcgctccgcatttttacgcccccggtgcatcacatcatctatggattttgccattttctggacgctggccccggacatgaagcccatggtcagttcccttctggcaagagccgccagcttatccgtatcctcccacagcgcctgggaataatttttgcctgaccacggaaactccagaatacgcttcagcatcttctcatcaaccttcgccaccgtaaagcctactcccatgatgctctgaatatcatagcagctacggtaataattggttttaaacatatcgccaagaagatctgtcagctttgtttctgtatccccggccaggtttatcatctgcagataaatctgcgaaagaagctgctcttttctgctgatcctggacttggcagacagcgtatttaactccagcagcgtcctggaatccgtctgggcctcagccacatacttatccatgctctttctccagcggctgtattcctcgccggacaggagcttttccgcttccgcgttatccagtttgttatcctgggcatacttctggaacatggcattgatctcattttccagttggttggccgtctcatcataaagatccatgatatccctggcataggtgtcggtttccttggcatttctcagaaccctttccttggcccgttcaatccattcattccgttctctctgactcatctacgccctccgcagctgcttcggcagtcatgccgttctgctggctctcaaatgctttggcaaaattctcataggtgccgaattcgtcaacatccttggttttttcttcctccagcttttccatctcatcatggacgttttccacccatggcagcatctgcagccttgactccgtggaaagcagtccggagagctgcgttgcgatctgtgtcagttccagattgttttccggtttgttcctgcggaatttcggagtgatgtccttataatcataatggccacccttaatattcaggatattggtaatcagctcgatccggcgctgcagcccctttttgaacttccgctctttcatggcacataactgttccaagccccagagcttataagcgattgctactccagaaaggttcccgccaaacgactcatcacacaaatgtggaacatgggacatggtatggatatcctcccgcagccggttcttaaaattctccattgcggtatcatccacctgcttcagcagccactggacatctcctccatcatccagaatgatcgcacccttttccttcatgtcccgaacatcatcactgctcacatctcccagcttcaggatctttaaaatagcatcatcgttgtactggaagtaattcgccgtattgctctgggccttattgtaggcatcaatctccgtgataacgccctcaaaatctccccggcgctcctcattattgatatactccacaaaggggacatcctgccagtaatgatcttcaatcgcctccaggttcaagtacccgttattgaatgaccggaaccggagaacctggtacgcattccagaactccaccttcaagatcacattcttatctttatcgacagaccggacgctcctgatcgccgccataggctgggcatggccgctgtcactctcataaatcataatcagatcagacggtgccacctttgcaaaacggatctgcgcgtcctcatcaagatatagcatttcaaagcagctcccacagatgctgcactgtttagccagctccatgttatgatcctgctcatcgttataatcaaaaatatcctgcaccgtctgcagataagcatcatcctgggagttatagacaaccggctgcccaacaaaataactggttgccgtatccgtgatgtacttcgccatgttattaaccagacggttgttcggtgctgtactgtctttcttggtctctgaaagaattcggtgctgccccacgtagtaatcagtcaacatcccatatttcagatccatcaggttttcatctatgatctcccgaatatctttttctgtcaggctttctgcagaagccctgtccatataaataaccggcataatataccgcctcctttacaatccagccgctctcctgtccatgatccggaaccgcttgcttttcttggcgattgtccggcagccttccagggcatccgggccatcatcgtgagcgcccatcggaaagtggaacatctgttccaggagccgtttatgctttttgttgaatttgatatagtggttctttacatctggctgcatggtctgaattctcatggtcttatcgctggtctgcggtacttcctcaatcgggagatacagaccggccctggcggatgccttggccagttcctcttttaaaaaccactggaactgtacagtctcggcaccgaactttttatagccccgtccaaaatcgcgcttcagccagcgttctttctccaggatatccgtgatgatacgatccgggtgcctccgttcaatatccgcatccagtacatacatgtaaccagtaaccttgcttttcgccagtgtgatgatcgcagaaaagtcgcttttcttggtttttccaagggaaggatcgacaaagccaaagaactgaaaatccttgtccttgaagtccatttctgcttcgttgtagtagtcgaaccattcctcgttgaaaacacagtcttccgggttgatcggttcattctgttcctcagagttaaaggaggcctcaccctctgtcaccttcatgaccatcaggtcatagtaagaaagcttttcctcccagagaacttctgtcccggccagcatcttttcccggtgtgcctcaaagaactttcgcgcattttcctcatggtcttcatcagacaggtcagtgaagatattttcccactcctgccataggtctgcctccggcgaaaatgatataactgcccggtacttaatcgccttgtatccagggtttttaagagtatttgctaataagctgtcataatggagcagggttccgatgtagacaatatctgtataatcatcaccggccttagaaaccgcttttttaaaccagctatccaactttgctctttgctccggtgtccggacattttcatcattctcaatatcatccaggatcagcagatccggtctccagttccggtgcttcctgcctcggatcttcttgccggagccaatcgcctccaccttgatattggtgctggtcaccagaacattgctcctccagacttttccggtcagatctccaaaatcttcccggatcgcttcgttttcttcaaactccacacggatgttatccaggaagccctccgcctgatccgaactatctgagataatgatcggataatgcttatacccatatacaacggcgtggatcgttcctttaaacgtcaggctggtagacttggcatgtccacgaggagctgccactacacgcttgcagccattcatccggctgatctgcttgaccagccccgatgtgcttggtgtaagcccctttaagactccatcctgccagatggcatccagttcccggtgaaattccggagacggtctggaaaaataatgcggaaagtaggcccttccgaagaattccatatcaacagcaccaaggcgctgccggattccgccttttccagtcagagctgcgcccgcttcataatctttcctgatccggacacgctctggtgaatcatccctgtttaaaaatgtttttaaaagaccagaaagatcgtttaaagcattctcctgttcttcgtagtaacttttgctttccgcttccgccatcgcgctgatcagcgccttcagacttgcgtcttttcctctccgcatgacctttcacctccgtcccgcatctttccctgttcaaattcgccccatacggctcattttgcctttatgtggtaatttccccgaccacagacctttaaacggttttaaacggcttcctaacgcttttaaaaggggaataacaggcaaagagaaaaggaaccggacagaggaagccaaaaggccgggcttcgccacccgaccagcgtccttttctgctcagttccttttctttatgcctgcgtcccgaacacagccgggacgaatcaaccggtcatgttttaagtcgcgtcttgtaataatggctgtgccgcatcctgtgaagcatcgcttccagcttcctgcagttctccgccaccttccacttcgatcccaagctgcacctgtctggcttcgccgcagatcgtaatttcaaaagttgccttccggcttcttttatcccactttaaaactctgttttctaactgttttaaaactccactgatgacagtgataccaccgcttccgtcttcccttaccagagtcggttccagcggctctccattgccggaaagaattctgatccattcagcttccagataggacagtgtcgatggtgccttactgtcccccaggaaccggatcactcccggaacctcttttacccggtaatagtttctggccgtgaaatccatgtccaggaacacatatcctgggaacagaatatattccttttttgtccatgccccaccagaccggatgggacggttctcaatgggaacctcggctcggattgcctggtttttcagcctccttgcaattccgctttcttctccagttttaacctgaatcacataccacacagcctatccctccattccttcgctttttttcttattgaggtaagcgctgacctgacggtacagttccggattatcctttgccatggtctcaaataccatgctctgaacagcttccagtcccgcctcatagttttctttgttctgtacttcgatccgcttcttatatgcagcagcgcggatcaaaccgttggtttccttaatgagcttctcgataggaacttctttcatctgttcctcatctacattggtcagggcatttaaaacgtggtgacttgccagccggatcagggcttccgaagtatccagatccggataacggttcatttcatccatcagcatggagaaattgctctgtgccacgttaatcatctctaccgtggccagatacttccttgcgtaggtacagatagccatctggctcatctcctcaccattcgccttcaggaaagccacgatctctttgtaagtgcagccagtaaggagcatctgctccacggtgtctttaagctccggcggcagtctgtccacctttcctgtgctgcgtcttctacgctcctgttccatcagccgtccagatcaaccatttcatccgtgatgccgccgccaaggagccggatgcccttgccggttacttttgcttccagcgtctgatattccacatcggccagattagccggttccctgctttccatatcacgcagatagatatatccctcctcatggagaaaattcacggagtcgatgaactcctgacgctcaatcccctccgcttttaaacctttttcaacacttcttaaagcattgtacttttcccggagcaggttgattgtcatgagtaccctgccgttattcaccataaaagctcctgcccggagtcttctcttttcctgttctctgttcattgtgaacctccttttcttgtcatttcgatcatcatatttaacatctgttccactttccgatccaccttattgatctcacgaatgaaatcatcctttgtcaggtaattctgccggatctccttaatctccttctggcacccatcaaaatccttactgtgagtctccttgggtgtataatcctcacggatcttattgatgtctttttttaattcgtctgtggtttccttcagatctgcttttgttacagaatcccgttctattttttgaagctgctggactgtgcagtccaactggttcatggttctttttaaaaaatacgagattacgccaatacccaacgtaatggcggttgttatgatccatccttcatccatccagtaattcctccaataaaaaaagatacactcatgtttctgacacaagtgtacctcttaggcccgtgaactgtcttttgaagcacttcactaatttacttcactttttaaaatgcttccggataatcatagatgctcatctgaccctccatgtcatcatccagattatccagttttccgaacaggataaatctcacccagcgctcggtaagtccatatttcgcggcaagttctctataatttcctccgtcaaattcttcccggatcttctgatcccgtgccgcccgttccaggctctctgccttcggaatatagattgtagtgccgccaaaagcccggacaagacttttaaacccgtccaggcccaccagttctaccatctttctctgatcttcatccaggttttctatcttcacatggtctaacaatcccatcgctggcctcctccttccgttccaggctttttaaatacccttttaaaacttcaatcagggtatttccctggctgaaggtgagccatgcaaagggattcttcgcaatagcgtctacatgcaattctttcttaatgaccgcgcacagtctgtctcccagtggaacctcattcggactcttatcgcgtttcttcagttcgtacatcaaagcccagattttcttctgctggccgctggtcacgcctcctggtctctgtgaatgttccttcggctttctgctggatggtttcggagcagcggtaccgccctgcagatcctccagccttttaatcaccgccatggcctcctggtaggaaagttcctttatggaatccttacctgtaacgcccgacaccagtatatgaagctcatcttcgcttccatttccggttattcccaaagcatgacctatagcatagattttcttcatctggaatgattctatctttcgcatttaccgttgctccttcctgctatttttccgcctctacagttaccttgattccttcatccacgaatatggctgcccggatcacttccaccgcttcctgcggtgtgcctccccactctgccgcttttaatatctgcagcatccattcccagttgatcacttcggatgccaggtaagcccagtcactggcttcctgttctgaaaggcccaccagtttcatcagggtttctgtgtccttttcatatttgcctttcaatttcttcttcagtgttctctggatcttctcatcctttgtgatggcgctgatcgtagcgtccaggcttccctcggtgaaatttcccatatacatcatggaaaaaagccgctttgccggggctgacatactataagaaacatcttcttttacaaagtccttgaagacatccccaggagcttctttaccattgtcatggagattggtttcacggtctcgctgtttccgaccaccactttggaattttcgcttccccaatattctacggttttgctcttcgtatcccggagatcatccgtggcctgcttctcgaaccaggctttgattgtttccatttcacctttaacggcaaccatctggcggtctaactctgccagacggtcaaccttcttttttacttccgccgcatccattatcctttaaactcctccatgatcttttctgcacatccgcggcagatctcaatgccgcagaccgttttaacatcgtccaccgttccgcagaagtgacaggtaggaacatgcttacggatatgtaccccgtcctcatctgcttcgatatctaccggaacacccggaagaatgccagtctcctgacggagctgacgtggaagtgtaaccgcgccactcttggctactctcttgcttacagtcatgatagacctcctctctcgctctgcatttcatgggcttgcgaccatcgccttaccggcggctgcattaagaggggcaagcgcccctggaatatcttgcgtttatagcttcataatagaatccgatattttgcacacatcccggacagttacttccttcccagacttcttggtttcttcatgaagcttttttatctccgcagttattttcataagcttaaagactcccacctgttctgaagtgattggaagcacatcagttccggctgtaactaatgtgagggcattatgaaaccaaaacacatccatcggattcatgagattgatttctttatcaaattgttcggctgcttccttagcaaactttctccggttcaatctcggtttgtctggcggcaggagcccttgttcctgaagttcctttttgactttcgatttgagtgctttctctttattggtcaggcgttttgacttggctggcatcttctctcctcctactggatttttctaccgtaccggaatccggtgctgtgtttttgaatccggcagatcagggaaaatgttgcctttatcttcgccttctcatcccagcagtctgcctccatgctgtaaaccatcagctcttttccgctgtcccggatgtaaaccgtctcctcataatggcgttccagctccggcgctgaatactgttcaccataccagcgaatacgcaggtcagaacctacgcagcgcggttcaaagtacatttcttctctttgtaccatctcatccacccgcctttctgacctcggtatatcgcttcacagaaccgtccagcatccgtttcgtcacaattctggctctcctgcactgaagcaaccggaagcaaactcgcacttcgttccactctctttccagttcttccggcattggagtggcttttttctccatggctttcatagtcgctccttcctgaaagttcttgtcttccctgttcttttaaggagcgcggcccggctgactaccaccagctccaccggcgtatccttcacgatcagccagttctccggtaccagcccttttccctgcaggaacttcttttgggccagtgtcggcttctttccgttcttcacgctgcacttacctccttattcagttttacctcactctgcctttatccgggcttgtgaccggcatccttccggatggctgcattaaggtggggctttacagccccggattttccctgtaccggatgagcatacgctcggtggttacagtgatcggcgggagtgaactctcccttccatcacgatatcctttcatccatgcccggtcatgttcgatcttcacccgcatctgaatgccgatcatccagccgctaactcccgccagagccatcaggaataccacaaccaggcttccggccactccgaccttgcccgctgcgatcagcgccgccattcccccggcggccaccgttccaagcgcgatccctgtcaccatcatttttgcttttcctgtcatgtacttcattgcatttacctccgtttgattgattttataaatagattcccagcgggcctgttaccttctgcagaccttccagggaaacatcctggttattggcggctgctgtgaatacgtttaccatgccgcgcactccccacttgctgtggccgacattgtagaggtatgtcagctccggtgtcattcctttctccaccagggaagggaataacttctcaacatcttctttggttacattcgtagcccggtaccgcccgtggagcttcgtccggttaaactgctgtgagaagatcgcttcctgtcttccaagcatcttgttgtagacctcatcgtttccgatcagtgcgattccgatgccaggcttcccggtgatcgggtcttcatccacccagcctctgatttcttccagggccatgaacttcaggttctgggcttcatcaataatcaggacattatcagaacttctcagccgttcacggattgaaatggaaaggtcttctgttctctggttttccgaaatcttcaacgcccttgcaatcatccttaaaaggcttcttacagagctggtactcggtgtggtgctgatatagatcgccgttgccggattgtcccgcaggaacttggtagccgctttggtcttcccgattccggcatctccgtcaataactacgatccccttttcaagctggcagtaacggatcatcttgtaaatgctctctgaaatagaggttgccacatatccccgtaccgcattgaaagactcggtcttcttggcgttttcagcctgctcctccttgatctggaagaactcacggatcttacgctctacatcacctacatcacccttgtcataaacgctgcggcggtactggcttaatactgctccgctcaggttcatcatcggggccagctttgcctggctgattcccgtttccttcatgtacgtttcaactttcgcctgaagttctgtattatactgttttcccatcatttacctccctgccttttggctgcattttcaatcattgtgtcaagatcgactccgccgaccactttctgatataccggtgtttcatctgcccgctgaacctccagtaccttcgggtctgctttgcctgtgtagctttctttgttgcgttgtgcctggcgaagtaccagatccagcgcggtaacccggtcggcttctgcgatgaccacgttctttttatattcattcgcgatcttctccagcttcctggtcactgccattccggccttcacatcatccttggttgcgccatatgtaagaaccgccgtattatctaccggaaccgtcatcagatatttgtcttccaggttgtagatccggacttccttcaggtcattcggattgtaccggaagtataccttctcaccgaaatgtctcatcaacagttcatcgttccaatattccaggcggcctccattgatatccagatgcactccccggcggcccacggcctgtggacggctgcttctcatgagcatcaggttcaattcttctgcggctgccacccggcgcttaatcagatgctcattaaacacatccattttgagctttcctttgtcttctgccaccgggccatcgtattccatcatgttgaagtaatacttcagaattgcatccacatactcctggaactcatcgtctgtgtaaatggcatctttcttcaggacatatttcaaacgctctggcttttccaccacgctgccgcccgtgtaagtattgaacagtctggaaaggccgttcttcacatcattgaaccggcgctcaatgatcttcgccttcgcatttcggacgatagcatttgtcatattgattcccaggcgtttgaatacgcccggcggttcaaaggtttcctcgccattctttggcttcttcttccggtggccaaggccgccaatatcgaaggtcaggaactctcgaccgttatccacgtagatgttatccgggatgccatattccaggattcccttccggagcgcgatcagcgttgcctctgaacctgggttatatgtaatgtagtaccctgtaaagattccgcttcttgcatccaggaaggctgtcagatatggcctgtgcagcttgcctgacttatccctcaccattacatcgaaggtatggttatcagcgatccaccactcattgctctgcatctcatcataaatacgtttgatgtatggagcgcagcggtcattgaatgccttgtgaccttcacggcccagaacctttactccctccggaacacttttcagtctccggtaaaaagaaggataggccgggatctgcgtatacagatccggacgcttttcctgcgcccacatctttgtgtactccaggcacttggttaccggatgctgggcttcgtccagatagtaatacaggaaagcctgccatatcgtttcatctatggagcttgtccctttcttccatttgttccgcttatcaaccagcgccttcatatcatcagccttcacggcattccattttctgtaaagcgtatctactgatatgctccgctctggatattccaggctgcagagcgttacgaactttttatctacttcagccagggaagtaactcctggcatctttctatatgactgccagcgcttggtgaggtcgatccagaaatcaatttcctttcgttcatcctcggtaaactcatcaatcgcaactttctctacttctggctctggccgttctacctcttccggagggttttctgcaatcagttgataatacttgtgctgcagttcctcatccaacgcatccagcggtaccaggtaagttttccggtttttgctattaacagtctctaccgcctttaatttcccatcttgtataattttcttaatataacgtggactacagccttttacctctgcaacctgtttcgctgtcagcatctgcgccatacatttccaccaccttttcagcctgtcctcatcagatgcaggaggctatccctgcatgaccggcctctgccggtttcgactcttttaaacggtgtttaaaaagtctttaaaatcatccatgtttccgcccagttcctggatcagcggaatgataaacttctttcctgatggcttccctgtgatagcctcgctgatcctggcctggtgtgttcccattcctgcggccagttctctctggctgatgcctctttccagcatcctggtttttgtccataaggcaaactcagcgaaatttcgcacttttctgttcttcattctgcctgccctcctaacgtattccgttataaaattctgtatcagcgatacaaaataacctattccgttatcggattctgtgctataatcggtcttgtatgattgatacattattataataatcctcatttgaggatttgtcaattaaaattgaggattttatatattcatgtgaggattattggaggggctatgactataaatgagcgcttttttaaattattagatgagaaaaaggtttcccagaaagatttttgcgaagcaacgggcattccgaagcaaaccgtcagcggttggaaaaatagaaaaactgatccgccagcatcgctgattcctactatcgcagcatactttgggatcacatctgactttttgcttaccgggaaagatgaatgcaatcaggcagatcttgaacttaatgacacatctactcagcaactcctgaaatacttttcttcactttctgaagtggaaaaaaatattgttctgggaaaagctgctgaattttatctgaaatctttgtccgaggattgatagtcctcatttgagtatcattgaccattttttcatattatgatatattcttagtgcatttaccaccttgctggactgcctaccagcaataaaaaaagggccgcgtcaattaactgaccggctcttttttggttcccattaactggttcccattaagttctcatttttcacttttataattgcttttaaattttattgttttaaacggtcttttaaaacctttcaaatgccgaaaacccttgaattatcaatactttctcccgtttccgcattttaattttaaaaattttaaaaggctttaaacccccgctttttattgagcttttttccctccattttcaggcatttctatgatttttcgtttttcaatgtgaattctggttcccattaaaattttaaggggtaaaaaggatctataagcctaaaaaagcccctattcacgggatttctcaccgtgtaagggactttaagggtttataagggttcgttggttcccattattgcaggttattcgataacttacaccggaagtgcctgacaggatacaatcaaacctccttttatcctttctaaaatttcctttttcataacacacttctccttttcctaagctttctattataaaaaccggctgcttcccggcgccgtattccgcctaaccttaactattatctttattcccactataccatatcaaaaaatatttttcaatatttcaaaataaataaaaattttttctatttccattgattttatcttttctttctgataagctcaaatcagcaaggctgaaaccgccgcttatggggaaggcccggaacacttgatgagaggagaacagaacaaatggagaaaaaacatattatatgctttggagattcgaatactcacggctactgtgccgaaacagacggacgctttgatgagaatacccggtggacctgtcttctgcaggcgaagctcggggatgaatacctgattctggaggaaggtttaggcggccgcaccacctgttttgacgatccgactcatgagggactccgcgggctggactatatttctccctgtctgcagacacatgaaccggttgatctgctgattatcatgcttggtaccaatgatacaaaagagcggttcggctgctctgcggagagcctcggaaactgcatgaaacgcctgatcctgaaagccgcttccactccgtactgctggcggggagcagaaccaaatattttgattgtgacgccgaaaaacatcggcatggaatatgaagaaacgcctgccgcatcgaccatgggcaaaggctgttctgaaaaatcggcaggactgtcccactggtaccgtcttattgccggccagacaggctgccactattttgatgccaacaccgtagtcagtgaaaacacgcccaaagactttatacatctgagtaaaaaaggccacgcagagctggcaaatgcgctggccggtttcataccgaccctgtttcaatgatacccctgtaccataaggagaaatcccgcttccagagcctaaaaacggttccggtctctccctgaagaaagaccggaaccgttttacctatttgtttaattatcactcttcggaaatgtttcatattctgcgaagctaaatactactctttttctgctgccaccgctactgcaatgctgagttcctcaagctgctttacatcaactgcggccggcgcctccatcatcagacacgatgcgtcttttaccttcgggaaagcgattacgtcccggatgctgtcggctcccaccatcagcatcaccatacggtcaaaaccgtaggcaagtcctgcgtgaggcggcactccgtacttgaatgcatctaacaggaaaccaaactgctcatttgctcgttccgctgtaaagccgagaacctccagcattttggactgtacgtcggcctgatggatacggacagaaccgccgcccatctccgtaccgttcaggacaatatcgtacgccttggcacgcactgcacccggatcggtatcaatcagaggaagatcctcttccatcggcattgtaaatggatggtggaccgccacatatcttccgtcctcctccgagtattcaaacagagggaactcggttacccagaggaaccggaaatcgtcttttttaagaagatccagctgtctggccagttccagacgaaggtttccgagaacatcgaataccaccttgtccttgtcggctgcaaataacagcagatcgcctggttttccgtccatggccctgacaagagcttccagttcttcctctgtcataaacttggcaaatgaagatttatagctgccgtcctcctgaatcgccagataggcgaggcctttggctccaaagcctttggcatactcgaccagggcgtcaatcttcttacgcggcatggctccctgtccttctgcattgataccgcggacggaaccgccgttttccagcgctcccttaaatacgacgaactgacagtcttttaccgtatccgatacattcttaagctccatcccaaaacgcagatccggtttatcggaaccaaaacgctccatggcctcacgccatgtcatcctctggataggaagctgcaggtcataatcacagatttctttaaataatgtctttaacagtctctcattgacgtccagcacatcctccacatcaacgaaggaaagctccatatcgatctgtgtaaattccggctgtctgtccgcacggaggtcttcatcacggtagcatctggctatctggaaataacggtcatatccggaacacatcaaaagctgctttaaaagctgtggagactggggaagcgcatagaactctcccggatgaacacggcttggaacgagataatcgcgcgcgccctccggcgtgctcttaataagcgtcggtgtctcgatctctaaaaagccctcttccgccaggaatttcctggtcagaatggccacgcggcttcttatcatcagattcctctgaaggtcaggcctgcgcagatccagataacggtatttcagacgaagctcctccttcgttctggaattctcctcgattgggaacggcggtgtctccgcctccgccagaacgcgaagggaattagccctgatctcaatctctcctgtcttcaggtttccgttgaccgctccggagcgtgcctccactttaccggtaacagcgacaacaaattcgcttctgagtctttctgcttttgcaaagcttccggctccgcaatccgattcctcgaaaatgatctgtaagattccggaacggtctctcaaatccacgaaaataataccgcctttatttctgcttttctgaacccatcccatcaccgtcactgtctcaccgatattcgcggtggacagttccgtacagcggtgggaacgtttgagtcctgccattgattctgccatgatgtttgtttcctcctgattattgtctgaatatctgtttctctgtattcccgtatctgccgctcaaacgataacctgcacgctccgcgcacaggtcaccgccatcacttaaatagaatctttataaaattccacgaattcttcgaatccttctttggcaagctgctccttctggaacttcttgttcttattcatctgggcaacggccactctgactccctttgccctctcttcctgggctgccttcaccactttcccaaactgctctttattgaggcctttctcaaacaggtaggctttcttgccgaccgtggacggaatcttgaagccgctgtccatcaggatcgtaatgatacgctcaaagccgattgaaattccgcaggcaggagtatccacgccggtgaattttccaatcagtttatcatagcggccgcctcctgcaacagaaccgccgaagccttccattgcaacctcaaaaatggtgcctgtatagtatcccattccccttaccagagtcgggtcaaattcaaggccgcattttacatcgttgatctcactcactgtatccataatataagcgaggttttccgccttttccggatccatgacggagctaagtgtctcgccgagttttctgacgccttcagcgtcgttttggattcctgcgagaagctctacatatttatcaacggattctttggcatatccggcttccagaagctccgctcccacgccttcaaggccaatcttatccattttgtcaaggataatgaatacacggtctgtctcattctccgggaaaccgctgtaatcggccatgccctttaagattgcgcggtcattgacgcgtacggtaaagccgttgtcaggacagattctggtaagcgcctttgtaatcgccagaattgtctcaatctcagccaggtttgtaccgtcaccaagaatatcaatatcgcactgcacaaactgtctgaagcggcccttctgcggtttgtcggcgcgccatacgctgccgacctgaagcgccttaaacggagttgtcagattggctgcattattggaataataacggcaaagcggcaccgtcagatcatagcggagcccctcctccaccagatcagcatccgaacgggccgtctccaggttcagtttttcacctctttttaaaattttaaaaatcagcttctcattatcgccgccctgtttgcttgtcagattttcgatatgttcaacacaaggagtctcgattgaggaaaaaccatatcctctgtaagtatctttgatgatattcaaaacataatctctcagttccatctctgccggaagaacatccttcattccggttaccggtttcttctttaatgccatagctttttcactccttaatctgttatcatacttttattgtttcactctgcctgacttatattagaatcgtaactactaaattactattcatagtagcagacattaataattttgcaagcactttttcttaaatggagatttaactgaggtttggaggacgcgtccggaacggaccatgtccggtgtggtgagggggatggctgagtcttccgtccccgtgggaggttgaccgcggagggggaatccggccggaatgaattgctgcggggaccgtttgcactctttggagtgcgcagcagtgctaagctcgtgagggacctcgctaagcaccggcggactcccatgtcccctccgcaattgattccgcctacttccccgggtcagtttttcgccggggacggaacactcaggcggaaattttcgcggcaccggacatggtccgttccgggcgctgattgtctccaaccttaaatggggaggaccctgtcgcggccactacgtgtttccgtcaggctgatattaaatcttccacaattttttataaaaggcgcattgaaggcatatcgtattttttgtacacggtagcactgagtggccgagacaaggtccgcccccgcacttaacgcgtgagacaatcagcggccgcaggccagtggacggggccgatacacccggcagagtctttcgttccggcgaaaaccttccgggagaaggagatactgccgacatcttccggcggagaaggagagaatgatatccggaaggacgttcgcccgagagatgatagctcttaggcagagggagacaaagcgcgccgggcggattttagccctacaagggcaaaatccgggacaacttgagcttcgaactcattcggagttcggagcgaatttgtccgtaaccccgggggctttgcctccctctgtcttagagctatccctcgaagaagcagtccaaccggatatcattctctccggctccgccctgcgaaaacaaaaccacagtatctccttctccagccagcgatgcccccccccgggacgaaagactcatataaacacccccccgtccgctggccgtaccggcggcgtcctcacctgcttaactaaatccccatcaatctttctttcctctccatcatctcaccgacccggctgatatactgctccacttctttcacattctccgccctctctatcctgttttcggagggataaagaaccttcgtcgtggtgccggcgccgcaggccatgatcgtctgcttttcttccataatcagaatattatagatgcattcttttccgggcgccgcataacccacattctcaaaatttccggccatatttttctgcctgtacagataatatgggttcattcccatctcttcagcgtaacgggccgtcatgtcgatcatttcctgggtgttttcaatctttaaattgccgtaacgctctttaaacatattcagcctcgcggctctcttgattgccagggaatgaacggttacgctgtccggtgccagcgcctttatctcttccatcgtattctttacatcgcaaagcgtctcttccggaagaccaacgattaagtccatattaatattatcaaatcccagcccgcgggccaggtggaatttctccctcacgtcctccaccgtatggcggcggccgattaagtctaacgtcttctggttcatagtctggggattaatggaaatacgtgtaattccatgctttctcaatacctccagcttctcctgcgtaatactgtcgggccttcccgcttcaactgtaaattcccggactttgtccgtcggaaaggcagcttccactttacacagaagcgcatccagatccccgggattcagcgatgtgggcgttcctcccccaaaataaacggtgtccagcggccgccccttcatcttctctgccacgtaatccatctcccggaacagggcgtccagatagagctttgtcttcccctcccatttcccgattggaaatgaggtaaaagaacagtacaggcaggtggtgggacaaaatgggattcctatataaaggctgtagcccttttcatagttcaccggctccaggagtgcaagctccctctttgccacatcaagagcgaggcttatcttctcatcgcttgtgcagtaggtttccctcatgtaatcgcggatccaccgggcgtcacggccttcctgaagctttgtcagcgctatctttgtcggacgtatcccggtcagcgtcccccagggaagttccgttcccgtacgggtacggagcaagctgtaaagtgtacgcttaatcaggttctttgcctcaaaccggttggtaaagtccggctttaccgaagcaaagctgacggttctgtcctccggcgcaccttcattgtcttctatataaaggtcgaaattacagccgcatttccctccctttacaagaaatcttgcctcatgcgcttcttccctcttatgagtaaatgcttctcccggataaaaagccatcagaagctcccggatatcctgctcaaaggaattgtcatccagcagaattgcaatcataattctctccctctgtatccggccagaggattgtatctcttttcatcccctatcgtggtatagcccatgtggcccggatatacatccgtatcttcaggaagcccaaacagaacattggctaccgagtttatcatctccctggaattccccgtcggaaaatcaatccgtccgtaggagccttcaaacagtgtatcgcctgcaaacagcaccttctccgatgctatataatagcagcaggagccgcaggtatggcccggcgtatggatcaccttaaactgatatccaatcagctcgaattcctcctgatccttcaaaagcctgtccgcttttaaataaaggcctccgctcataaactggcaggacaggttcttgtccggatccgccaaaaccccggcctcctgctcagatgcaaaaacaggcgccttatatttcaggcgcagctcctccatcgccattacatgatcaaaatgaccatgagtcagcagtatggccttcacagaggcgcccagttttccacatgtttcaatgattttcggagcgttatcccccggatccacaatgacagcctccttgttttgaggattcaatgcaatataacagttcgtttccaccatccctactaccagtcttgttatctccaattttatatccgcctttctcttgtatccgcagaaaacatgccggagccagcagctgttgaatccgagtatactgcgtaaattcccgtgactgagcatccgccatccgttcaggacaaagcgccgaagcggcgcagcagactacgcccggcttcggcagcacagcggtgacaacgttttaacctgcagttctctcgatatcaagaacaccttcaatttgtcttagcttatcagtcagtttatttaactcctcaattccatgaatatcaaacgccatcataatggtggctttcccctgtttgctggtcctgacattcatcgaggtaatatcaatctgacgctctgtaaatacttttgagatatccacaaacatgccgatccggttattggcgaatatcttaatctctgttgaatacttctctttcccggtcgagccttcgggctgctgccactcggcatcaatcagccgttcccgctcttcctccggcaggttaatcacgttaatgcagtccgtcctgtggatggagattcctctgccgcgggtaacaaatccgacgatctcatcccccggcaccggactgcagcacttggaaaaccggaccgcaaggtcatgaatcccttttaccacgatgccgctctgtgatttaccggccgccagcaccggcactttgctgccttcgctgctgatgccgtccaggatggtagcgtccgtctcttccttcttcagcttcttgtttctctcctccagcatcttattgatgacctggccttccttcaggccgccgtgtccgatggaggcgagtacggaatcccagtccttaaacgcatagcgtttcatgaccttatccgtgtattccggtttattaatatctgaaaagttgactccctttgcgcggcagtacttatcaatcaggtcgcggccgcgtaaaatattgtcttcttttaattccgtcttaaaccactggtttatcttattctttgcctgtgtactcttgacaagctttaaccagtcccggctcggtcccttggaattctgggacgtaataatctcaatccggtccccgttctggatcacatagtcaatattgaccagtttcccgttaacccttgccccaccatcttgtttccgacggcgctgtggatcgaataggcaaaatcaataggcgtagaaccgctcggaaggttcttaacatctccggttggtgtaaaacagtatacattgtcggtgaaaagatcgaggtcgctctttaaaagactcaggaattctttgttatccgacatatccctctgccattccagaatctggcgcagccaggataatttcgcttcagcgctgtctgtcgctgatttactgcttccgctctctttatatttccaatgggctgcaataccgtattccgcggtacggtgcatctcaaaagttctgatctgtatctcaaaaggctgcccgctgctgctgataagcgtcgtatgtaaggactggtacatgttcggcttcggcatggcaatataatctttgaagcgtcccggaatcggcttatacagttcatggatgactcccagagccgcataacagtccttaaccgtctccacaacaattctcactgcaaataaatcatatatctgttccagggtcttatcctggttaaccatcttcttataaatactgaaaaaatgtttgacgcggccgtccaccttggcttcaatgccggcgtcttccatgtggctttttacttcaaatacaatcccctgtacgaatgcttcccttgcatccttgcgtagggccaccttctcggccagctcataataaacctccggctccagatattttaatgacaaatcatccagttccgtcttaatctttgatataccgaggcggtcggcaatcggagcgtaaatgtccatcgtctccctggctttttccttctgcttctccggcttcatatactggagcgtccgcatattatgcagacggtcggccagcttgatcaggataacgcggatatccttcgccatggcgaggaacatctttcttaaattctccgcctgaatctccactttatccatggaccatgatatctgtgtcagctttgtaaccccgtctacaagaagggcaacctcttcaccaaatatggaggtcagttcttcctccgtcattaccgtatcttccacaacatcatgcaggatgcccgccactatcgtctctttgtcaagctccaggtctgccagaatgatggcaacacaaagcgggtgaataatatacggttcacctgatctgcgtttctgttccttatgggcgttatatgcaatgtcatatgctttctccaccatcgtaatgtcatccgacggatgatacttgcgaataccggcaatcagttcctggtagagtttttccggacttgtaaagtcggccggcgcctctatctcctgatccagttttttaattatttccaaacttcccatatacaatgcctcctggcctccgggcagctttccccgtcggtttatcaattcttaacagaataatcactattataaatatttttgtcaaaaaatgcaagactttcagggttttacgcctgattcagccgtcttatgcagttattgtccacgtttcgccggcaaatgcgcttccgtaaacagtaataaaatctcataagccgacgcccttgtgcatatctgtcatgtgatattctgcgtctataacaggattattccctcacctgtctattctattcagccgcatccctttcgtttcctgtgcttacaaagaacctgacactttatagccggtagcccggtcaaccacacttacatactcttcgtgatgtatatatgccgcaaggtttttcaggctgatctccacgatccggtccactgtatacggaagatggaaacctcccgaaacatggggcgtaatcagaagattggggcagctccacaattcactgtcctcaggaagaggctcctgctcaaatacatccagagacgctccccacagctttccctccttcagcactttgacaagcgcctccgtatccacgatattcccccgtcctacatttaaaaagacggctccttctttcatcgccgcaaactgccgttctgaaaacagatggaaggtttctctggtccccggcaggcatacggccaccacatcggcctgggccagacgcttctccagattttcagccgtgtccatctcgtccatgcagtccggtttttcccgtacggtccgtctgatgcctgttatataggctccgaacgccttcattctggatgcaaattccattccgatgtcccctgcccctacaatcaggatatgggagccgatgattgggcggacccttcccgcatccttccagattctgtttttctgattttccagatagacggggaattttttcaaaagcattagaagctgtcccgtcatatgctctgcaatcgctgttccgtatgccccggtcgcattggtgagcacggcagagccggacagcactccctctgccagatagccgtcggttcccgcgctgttaagctgaacccactcaattccctggtttacggcaagcagggacggcgctatgttgccgatgaccgccgtaaccctggccgccagaccggccgtaacctcctcttttctgcaatatataaattctgcctcaggagcaatattcgaatactgtcttttctgctcctctgtaaccggcagcgtcactaaaatacgtttcatactatctccaacctttccgctaaaaagaaacccgctcgggtattccccgcctgcggcggaccgcttcggcggcataattccctaccaccgctgcacgctctgcgcacaagtcaccgccgtcaatgaaaaggcgccgcgtagatcctgccgcagcgcccttccctgacttatcggcagtgaaaatcccgccaagcgtgcttttcactgctgtcaaagcctatctgacaatcttattttccttcgtaggtgatcagggaatcaaccggatattcttccagacggtctctgccgtgtaagccggccagctccatgacaaaacagattttaacgacctctccgcccagattttcaatcagcctaatcatcgcctccgtagttcctcccgtggcgatcagatcatccacaatgaccaccttctgccccggctttatggaatctgcatgcatctcgattacggcgctgccatattccagctcatactccatagcaaccgttttacagggcagctttcctttttttctcaccggaacaaatcctttgtgaagcgcataggcaacaggaacaccaaagataaagcctcttgactcaggtcccacgaccacgtcaaaatcaactccctccaagtctctcagtataccgtcgatagccagatggaggccgtccggatcctgaagaatcgtggtgatatctctgaaaatgatacccggctccgggaaatccggaatacttctgacatattcttctaactttttcatctgctttcctcttttctcaatattactgctatttattctgtatatgctttcttttcgggaatgcttccccatgccactcttcatccagcctgtcgtaaggtgtcggctttctgcttttctttcttatcagccatcccccacagcgagcataagcaggagtgcaagggcggctgcactgatgacagctcccatcttcaggccttccggcatataggtgaggacaatggtatgccttccctccggaagctccagcccggaaaaggttccaagcatcttcctgagcgtcacaggatttccgtctaccgtagccgtccatcccttatcatacggaattgacagaaacattgtcccgccttctcccgcatccacatttccttccagataatcatcatcccacacaccgagaataaacggattgccattgagcctttcgtatacggccttcaggccctcttccctgaacagatatgcctctgcattcagctcgtccgagttgtccttattttccagtgttacggtctctcccgctttcaggtagccggtttccaccagatacccgcggttcaggctgtcaaaggttttcgtcgtctccccgacagtcatcttaacggatttcacctggtggttcatgacacaaatataatactccccgtcttcctccggagtgaagctgaatgtctttgcattattctcacccagaacactttctaaaacgggcggggcatccagagcgtcacagagattattctgcacatccgccggatttggaagatccctcttccaacccgtctccataatatccggcatcataaacccaagggcagcgtatagggattttcgtaaagaaacgtctccccggaaaattccttcaactggattctcggattctcctgcctgctgttatacagcgaatatctgacggaaaacagggaatccacaagcggggtgctgccgacgctgctgtatgcattagtcgaaccttcgcatccgacttccttaaagaaagcagtcatatcggcattggccacagaggaaaacagggaaaccgacggaaaattcatccaggccccgtcattcttcgtccttgcgtccaccttgtcaacacggtaaaaaccgtttcccgtccttaaatcgccggtcagttcaatgacgccttcattgtccgacttgtaagccgaacggctcgttgtcgtgatactggtcacggtcatgttaaccgcagcttccaccgcaaccacggccagtgtcagtaaagctgccgctgtcctggatctgcgcgggttcttataaaaatagataaggcctgcatagatcgccagaaagaggattgccacatagaatacaataaagtggaacgccttgtccgtcaccagcttctgtgccagaagcacatagcagacggacccccagaatgcggccgcaatatgttttttcggtgtttcttccagatgcatataagcccggtaacacatggacagtatcaggaaaatgtaaataaaggactggcggcagggcaggctgttcggataatggaacccgtgccagataaaattcagtacattgattgaaaagctggcaaaaaacagaagcagcagtccgcagaataccgccttttccttcaccggaatctttttgcacgccagatacagcaggaagaacataaatacggccacaccgcagtagatatttggccaatgctcaagtcccgtttcagtctgcacatttccaatgtgccttgcaagcatgtcgaaaatagaaaaatacatttcatacgtcttcgggaaattgaaatctccggaggccgtgctctgcagggcggcgatctccggtaacagcacaaaggcggccagcgcccctgctatcagtgaatatcctccaaactggacaagactgatgaaaaagtcccgcgcgcgcctcttcccctccagaatcagaagacagatgaaataaatcaccataaaaaggcagatcataatggaaatatagtagttggacagaatggaaaggccaagggtcacgcagtagagcatccctttcttttcctttacaagcttttccagtcccagcataatcagagggaataaaagaatacagtccagccacatgatattccagctataggcagccatatatccggaaagcgcataaaaaatcccgaaaaatccaacgccgaaatccgatgtccgattatgtttcttcagataccaggaaaatgtaagtccgcttaagcccgttttaaacacaatcatataggtcataaactcaatgatatattctttggggcacagcatgacaagccagttgagcgggcttgccagataataggcatataaagcggcaaaattcactcccatgccaatatcccagctatacagcagacttccgccggttctcagtttatggtgaaactcggaaaagaacggggcatactggtggtacatatcggttctcagaaagctctcctgtccaaacggaaatatcccccgctgggcaaatatcacgaccaaaacgataaccggaataaaaaatgccgctatcagcccgtccgacggatggagaatgccgccgcaccgcgtcgattcctccctgcccacgctgtattcaccctcgtcgctgtattcttcgtcgctgtattcttcttcgttgtattcttcgtcgctgtattcttcttggctgtattcttcttcgctgtattcttcggtgttatattcttcggagttatcgccgccgttgttaccgccgttgttgccgacgttgttaccgccgccgttgacttcaccgtcatcccgatattcattttctttggcggctttgccggctgtcctgttttccccgttatgttctttctgacagctgtccggttcttgcgcatagaacaattctttcaccgccttatcctgcggctgtttccatgcttttatccggccggaaacaggctgtccggcctcctgctgttcccgggcaccctggcttgaggcactctgttcctgtacggcccgggccgctgcgtttttttcaaagctctgctgtccggatagcttttcatccggaaccggctgtcccgttacctgctcagcaggctgaattcctgccgacacctgttccagcacctcttcaaattctctggaaattccggatatctcatccctgtccataaattcctccaaaacgttattctccgcatccctgttgggaaacggggatctgagcaatcacacgcttcaattaaaaacttccatcattctcttgcgtctgccgtctttttaaagataaataatttactgaatatataattcagtaccagcgacatcgccgataccgctacttttccaatccactcattccagcccattacatccacgataaccaccatggccactactgtgaaggcccccgtcagggcgcggcaggagacaaaagacacaaactccctcgaaagctccttcggccggaacgtatagctctgaaagacaaatatcttgttggttacaaacgcaaaaatcactgctgccgcccatgacacgacagaggaccaggctaccgaatgatcaagccacctcatcagcgggtagaccatccagtccaccgcagtcgtcaggacaccgaaaataaagtaggaaaccgtctcacggttcacgaaccttgcccacagttttcccattttttcttttaacatatcagattcctcataattttctcacgttatttgagccgtttgccctatattttatattagcctgactctcttgtaaaggtttatgccgtatcctgctgaaatttgtaagaaattcgttactgtacacaggccaatgtcagttagttgacactatggagatttaactgaggttgggaggacgcgtccggaacggaccatgtccggtgtggtgagggggatggctgagtcttccgtccccgtgggaagttggttgtggagggggaatccggccggaatgaattgctgcggggaacgtttgcactctttggagtgcgcagcagtgctaagctcgtaaagaacctcgctaagcaccggcggactcccatgtcccctccgcaattgattccgcctacttcccctgggcaggttatcgccggggacggaaaactcaggcgaaggttttcgcggcaccggacatggtccgttccgggcgctgattgtctccaaccttaaatggggagggccctgtcgcggccactacgtgtttccggcaggccgatatcaaatcctccacattttttataaaaggcgtattgaaggcatatcgtatttcccgcacacggaagcgctgagtggcctcgataaggtccgccccccgcacttaacgcgtgagacattcagcggccgcaggccagtggacggggccgatacacttggcagagtctttcgtcccggcgaaaacctggccttggggcggaggggacatgggagtccgccggtgcttagcgaggtcttttcgagcttagcattccgatgcgcactccaaagagtgcaaacggtccccgcagcaattcgttccggccggattccccctccacgacaacctacccacggggacggaagactcagccagccccctcaccacaccggacatggtccgttccggacgcgtcctccacacctcagttaaatctgtgaacagtaaaagaaatttcatcttaatgctataagcgatgacaagcgcattccctgaacttttaaccgccaatcagcaaaaaaattgtatgggccgccggcactgcagaaggcccatacaactttaaaccgcaaattacagtaactgttcatgctgtctgaaccgttacaaattatgctgttacgctcttatttcgttgcaccgagaagcttgttaacggtgacaatcttgacacagagagcaaagagttccgtagcggttatcagatcctgcagcggcggataagacggcgcaatacgaatattgctgtcatgcggatccttgccgtaaggataagtagctccggctccggtcatcacaaccccggcctttttgcacttagccacaatgtctttggcacagccgtccatggaatcgaaggaaataaagtatcctcccttgggactggtccaggaaccgattccaagtcctcccagctcacgctcgagaattgcctcgaccgcctcaaattttggtcttaaaatctcggcatgcttgcgcatatgctccaccatgccgtggatattcttaaaataacgtacatgacgaagctggtttaccttgtcatggccgatcgtctgcattcttaactgctttttgatatcttccaggttgttgtgggaagttgcaaccgccgcaattccggaacccgggaaactaatcttggatgtggaagagaacttataagccagatccggatttcctgctctcttacattctgccagaatttctatcaggttatcctgatcgtcatcatataaatggtgtacgctgtacgcgttatcccagtaaatcctgaaatcggcagcggccggtttcagccttgcaaaacggcgaacggtctgatccgaataggaattgcctgtcgggttggaatatttcggcacgcaccagatacccttgatgctctcatctttggatacaagctcttcaactatatccatatccggtccttcttcggtcatcggtacattgaccatctcgatgccgaaatactcggtgatggcaaaatgtctgtcataaccaggtaccggacacaggaatttaaccttgtctagcttgcaccacggggtattacccattactccgtgtgtcatggaacgggaaatcgtatcatacatgacattcaggctggagtttccgtaaataataatattgtcagccggaacttcaatcatgtcgccaagcagctctttggcttccctgataccgtcaagcacaccgtaattgcggcagtccgtaccatcttcacacgttaaatcacaatcgctgttcagcacatccatcatccccatggataaatcaagctgctcaacgcttggcttaccgcgcgacatatcgagtttcaaatctttcccctgaaatgcgtggtactgggcagacaggtctttcttaagctctaacaactcttctcttgttaattcgctgtatggcttcatcctcaaattcctccttaatcattccaatatccatcttccggccctctcaggcccggcctgtatttttttccaaacaatcgccggaaggcagtaagataatgatagcataaatacagaacgcctgacaagcgtatttttctataaatatgtgtcgatttttgtataaaaaattattacattgacatgtttccctgcagaatgctataatgcatgatgctgtaattgttagcacgctaattaacaggaggataatatatgtcagctacagcccattcaaatgaaaataaaatggggaccatgccggtcaataaactgctggtttccatgtcgctgcccatgattgcgtctatgctggttcaggcgctatataatgtcgtagacagcgtattcgtcgcccagatcagtgaaaatgccctgacggcagtttcacttgcttttcctattcagagcctgatgattgcagtttcatccggtacctgtgtcggtatcaatgcactgctctcccgctcccttggggaaaaacgccagaaagaggccaacctctccgcagtcaacggcgtatttctggccttcgtcagttatcttgtatttgccctgatgggcatcttaggttcccacctgttctttgccagccagactgaaaacagggagattgtggagttcgggacgcagtatcttaccatctgtctcattttctccttcggaatctttatggagatgacctttgaacgtattatgcagtccacgggacggactatctacagcatggtgacccagggaaccggcgccatcatcaatattattctggatccgattatgatttttggtctcttcggttttccaaggctcggcatccggggcgctgcgattgccacggtgacggggcagataatcgccatgattctcgcagtctggttcaaccataagaaaaaccgcgacgtacagctgtcatttaaagggttcaaacctgacggccgtattatagcgaagatatatgaagtcggtgttccttctattgtcatgcagtccatcgtatccatcatgacattcggaatgaataaaatcctgataatgttttccgagacggccgtctccgtcctgggtatttatttcaagctccagagctttatctttatgcccatcttcggcctgaacaacggcgtgattccgattgtcgcctataattacggcgccggacataaaaagagaatcatggataccatcaagcttagcacctttattgccgtcggcatcatgctgattggcctcataattttccaggtattcccggaaggcctgctgaagctgttcaatgcgtccgatcacatgctggaggtaggcgttcccgccctccgcatcatcagtaccagcttcctgttcgcaggctactgtatcatcctcggctccgtcttccaggcgctgggcaacggcgtctacagccttatcgtatcggtagccagacagcttctgtgcattctgcccctggcttatgtatttgcccgtgtggcagggctccacgcagtttggtattcctttccgctcgcggaactgatttccgttacgctcactacgattcttttcagaaggatctatgtgaaaaagcttaaaaatctgaaaaacgataataattaaaagattcatacgataacctgtacgctcttaccggcatcaaacgataaccggcacgctttacgcacagatagccgtattaaaagaaagtccggactgccatcttaagccttagatggcggtaccggacttttttcgattttacttttattcctgctccagcagcttcatcagacgggaaattaccatctctcaaccaatacagagcatcagtttttttatccccaaggccctgtgttccctcataaaccgctccattttctccagattataatccgagtgctccaactgccttgaccagaggtgggtcgtcaatatctgttcttttcgtgtaaagctgcctgtctccgcaaagattcccaggtcaatctccctgattataaggcagttaaacacggccatttttacagcggccagtaaccggccgtcatagacggcgcccagcacattcgtatataagaaatatctcatcagctgtgccatatcagaatcgaacgcgggatatccggctttaagttcattcagcatttcatgaaattcgtatccccccggcccacccattccgtcttcaggagcatataaaagctttgtataccttctgaccatattcttccactgttcggagactgtctcaagggtctcggtcagttccaggtaaaggcacatcaaatcgtccctgaccctgccgttcccgtctcttctataagaagtgagccgtgaaatatagcgggcccggttctccggcagaagataacgcgccgtcaggctgtccatattcttccggccgccggcctccgccctcatgcccttccggttacggagccttccctgcgcatcatgggccagcgccagtatcattgccattctgtcttctatggccgtatcctcccaggataggatggtaaaaaaggcatttctcactttaatgagctgtttcagcagtctcccgtccacctctaacccgggatttccgtgcgggatactgcctgggaacggtaatctgggaaccgccttccccggctctatccggactctccttctgcgcagataaaattcatccgttcccgttttctccccggaagtttcctgttctcccagtatcagtccggccgcctcaggacaggccaatgacaggctgacttcccgtaacggtccgtactcttccctgtgacgaggaaaatcgcggcaggtcctgcacagttttttttccccaaggcagatatagatatcgcaaagattcccttcatttaaaaacgggcatcttccgtttttctggaggaagctgcccgttttactgtctatggaatttttgagccgtctcccgaactctccgtttacgttccgatacctccggagagaaacggggtctatggagacgccccaggaagcgcagcaggtgtcttcacaccgggagcctgtacaggaaaattttttataatagtgcggatagcgcaccgtgattatcttttccatatttcctttccattaaattcccgcattatttctgttccagcaccttcatcatctcacccagacggttcagggcctcatcaagggtctccttctgtcttgcaaaatgaagccggatcagatggttcacttcctctttaaagaaactggaacccggaaccgcggccacgccgaagctgttgatcatccactcgcagaattccaaatccgtatacccctcaaactggggaagcgccaggaaatcggagatgtcgatcagaatgaagtaagaaccctgaggcaccgtatgcttaagtccgatccggtccagacctgccacaaagtaatctctcttctccgtataaatgcgctgaagctcttcataatattccggtccgaagttcagtccgacggttgcggcctcctgaagcggcgccgctgccccgacggtcaggaaatcgtggactttttttgccccctcaatcacttcctccggccctatcagataacccagccgccatcccgtaatagaatatgtcttggagagggaattgcaggtaattgtcctctcatacatccccggaagccctgccatatggacgtgtacattcggtttgaaaatgatatgttcatacacttcgtccgtcacgacgtatgcatcgtattttttcgcaagctcaccgatatataggagttcttcccttgtaaaaacttttccgcagggattggacggattgcagacgataattgccttaactccctgtttaaatgcatcctccagaaccgcacggtcaaagttgaactccggcggaatcaggggtacataaatcggattggcgccggatagaatggcgtcagccccgtaattctcataaaatggggaaaatacaattacattatcccctgggttacatatggtcatcatcgcagccatcatcgcctcggtgccgccgcaggtcacgacgatctccttatcgggatcaatcgcgcggccgatggcgctgccatgcttttttgccagcgcttcgcgaaaattctcggccccgaacgtgatactgtactggtgaggcccttccacggcggcccttgccagagcatcggtaatctctttcggcggatcaaagtccggaaatccctgtgataaattgatagaaccttctttcgcgtcgctgattctcgtcattcttctgatgacggaatcagtaaatgttccgacgcggtcacttaatcttggcataatcttctcctcctgatttgttactgttcacgcctcgcgggacacaaccgtgtgaacagtaaccctgatttccctgatcgggaatccgtatttattataaaaccttgctcaggaaatccttggtcctctcctgcttcggatccccaaatatctgttccggaatacctgcttctgctatgattccttcatccatgaacaacacgcggtcggaaacctctttcgcaaagcccatctcatgggttacgatcacagtggtgagtcccgttgtcaccagctctttgataacagccagaacttccccgaccatctccgggtcaagagcggaggtcggctcgtcaaagagcattacttccggttccatggcgagggcgcggacgatggcaaggcgctgcttctgaccgccggacagctttgtcgggcggacatccgccttttcatacaggccgacgcgttttaaaagctctgcggccatgatatgcgcttcctcccggttcttttttcccagcagcacaggtgccatcgttatattctcctccaccgtcatgttgggaaatacgttaaaatgctggaataccattcccatcttctgccggtgtacgtttatatccacttttttatccgtcagatccacatcgtggaaataaattttgccgctgcttggaacctccagaagattcaggcagcgcagcagcgtgctttttcccgaaccggacgggccgataatggacaccacctcgttctgccggatctcttccgtcacaccttttaatacctggagcctgccgaagtcttttttcagattttctaccctaatcattgcttgccatcctcctctcgaatactgcaatcagcttgctgagcgtaaaggtcagcaggaaataaatgattccgacgatgataagcggttccagcgtcagatataaagctccgttgagcgtacggaaagtcgtcataagatccccgaggaagaatgtggatgcaagggaagtctctttgatatccgtgacaaattcattgcccagggcaggaagaatatttttaagcgcctggggaagaattacttttttcatagcctgggatgtatttaatccaaggctcctggctgcctccatctggcccgggtccaccgcctggattccggctctgatgatttcggacacataggccgtagcattcaatacgagggccgtgcatacacaggtaaatttagacggttcccagggcagcatctgcggcaccaggaaataaaacagatacagctgcagcagcagcggggttcccctcataatctcaatataagcggttgccagaaacgaaagcactttaaactttcccatcttcgccagtgcaaccagcgttcccagcacagtgccgaacgttaccgtaatcaaagccagcagcagcgtatagcccattccttccaggaataagccgctgtatttctgcaccagcatcgttatattacctaccatattatcctccattctctaaattccggtcccatccctgcaccggacatacgataacctgcacgctccgcgtacaggtctccgccttcaataaaaggggtgccggaggtaccggcttttgccggacactccgccactcctgtcaaccattttcttaccggaaattatttcactccctgaatctcgttcgataactggcttgcttcctcgatccactgatagtagattccgctgtcaaccacttccttgataatgccgtttaattcttcaaggaattccggttcgtcctttacaacgcctgccactacgccgagagaagtatagtcgaatttttgactgcattcaactaaatccggatagttggcaagataattgtctgcagctacgcttgcgagggcaatgcctgccaccttccctgtctttaacatcataattccatcggttacggcgctgaccacttcacatttggcatccggaatctgtgttgtaacaagatcatactgaagagttccgttctgggcggcaatgctctgtcctgcaaaatcggcaagtgatttgtactgatcggcgctgtctttcatgattacgattacctgatcgccgtcattgtagtagacatcactgaaatccattgttgtcttccgctcctccttcggtaccatgccgcagatggtgagatccacgcggccctggccgatcgccgccatacaggcatcaaatgccatggcctcaatctgaagttttacgcctaacttgtcggcaatatattttgccagctccatgtcggcccctacatatttatcctggccgtcttttgtgatatcttcaaactcatacggcggataatcgggggaggtggctacctttaatacacctgcctcctttatcgctttaagacggccggtcagttccgtacccgcgtcttcctttccttctgctgccgcattctccgtgcctgcagccgtcgtatctgccgctgcttttgtagccgtaccggctgttgttttgccgcctccgcatgccgcgaggctgagcgccattgttcctgctaataaaaccgctaataactttttcataattctcctccattccgcctttcaggggctgacacttttttaactttctgagatatctgctcccagtaaaacctccagagcggtggctgccatggcttttgccgctgtgtggattaattcgtgggcgctctcagaatcgacgattctcaagaaatcctcctcatgaggcccggcctttgtcatgctgcctacacccaatgtacaataacaggtgggacatgcatatgacacattgccgatgtcggaactgccggaatgatatctgtctccgtccgccaggtccgtaattccaagccctgcaagctgttctgtcataatcgcgttcaatttatcattgcgttttatatcaaagtacgtattttccgctctcttaaacgagaactttgcgccggtcataagggcggctcccctgccgcagttcaataccttttcgattacttcctccagataatccttctggcctgccctcacaaagaccgccatggatgtatagtccggaacgatattcggagccattccgccgttcatcaccgtatagtggactctgacgtccggctccagatgctgtctcagtgcgttaatccccgccattgtcagattgcaggcttccagggcattgataccgttctgggcattgctggatgcgtgtgccgcaacgccgtgaaactcaaaaatgaaatccgtcatggccaaagcaactgtattgacactggattcctggctcagatgcatctgaaatgccgccgccattttgtcaaaagcaccctggtccgccatattgacttttctgcctgtattttcctcggcaggcgttcctatgtatacaatctttcccttaaagaggggcttaatctttgccagtgccgcgcaggctgcaaaggtgctggctgcaatccagttatgtccgcaggcatgtgccggtgtgtcgtggccagggccatatccgggaagcgcatcatactctgccagaaaacagaccgccggtccgtccccgtctcccagctcacaccggaatgccgtcggaattcccatataagggaactcaacctcaaagcccagcttcgcgatttccccggtcagatattcggaggaaaaaaattcctggtctcccagttcggggtgcataaatatactattgcttatctcttccgcccaggatgcaatctcatcctccgcctcccagagcttttgttttaaagattcatcaagcataaatattctcttttctatttatttttgaatatatataagttttatgtgcataataataacaccatagcaatccgttgtcaacttgtttttttactgatttttccgcatgtttcctcatttttttgtatatttagtgtaatattctcttggctgttttttcatttaacctttgtaaataaaggattttaaagtaaattaaagctttatggcgctttacaatgattatgcaggaatccaaagtggagttcctgcataaatatgtttttctattatattttgttcatatttattcacaatattatgcataattgaggaacgacagcttatgaacggcctgcttcagtcacccggatgctcgcttccactgccttttcgtacggtcatcactgcaaatgcacagacttgtctgaactgttacaccatgcctccactttgcagacggcttcccaaaccatatcttctgtaacaggataaggaatatgttccatatccgggccgctcaccgactctttcagcatatccctgagaaattctttgtccagcgccactcccatttctttcaacgtcacgggaatctccatactctttaaaagtttcctcacttttgcaagcgttccggactgaccgtccacagccagctggattaaaattccataccctaccagatctccatgcagaaaacgttccgccacgccgggaatcagatcgagaccgtagcatacggcatgggccagcgcgcaattatagcagtcctccaccatatgagatacaagtcccgtgtttaccgttatcgccagcactgcctgtgtgaacgcttcccctgcttttccttcgccaaattccgccagagcttttcccgcataggttctgattctctcatagcagagattgcttatctccctgcccagggccgaatggtaatccagctcatcccctcttgcggaaaaatgacattcaaaatattttgcaatggtatcccccataccggctcgaaaatacatcttcgggcatgaatcatgatatcggtgttaataaagcagtggacagccggacgttcgaagaagtaaaaactgtcaaacccccgtcttttctgtacacgacggagagtgccgccatggaggcacagttggaaggtatcgtcggaaaagtaaagaccggtacccccagctcatatgcggctccctttgccgtatccatcgccttgccgccgcccattccaaataccatatcaatcgctttatctttatagagactgctcagttcacggattctttcataagtacattctgttccgtatacggccgcatccacaatttccagtctgctgtccgccgctttcagggcctcgcaaaggacaggaagcccttttaacattcctgtctccccgcctatcaaaagcacacgttttccataaggagagcaaaagcggtctacctgccgatatgattcatctcctatcgtatacccggcgaataattttgtcactgcatccattttatttcctccgtactttattgcctgatatccaggtattctgccctgtacttttccatcaggcggcagctctcatcaaaacgttttgcttcctcctttgacagcgccggggcaattcgtccgatcactccgcccgcaccgattacagacggaatgctggtgtaaattaccggactgttctcatcttttttatattgccatgagcaaggaagaacacggcggctgtctgtcagaatcgcctgaatcagcgaagccgcggcggctccgataccgtactcggtactgccttttcccgtcagaatcttccatcccgcctctatggtcgccttctctatctcatctctgttaaaacggccgaacagctctcttttttcctgttccagctcctccaggaaacggcctcctaccctgacctgggaccagaccggaacctggctgtcgccatgctctcctacgcagaagccgcccacatcggccggagccacaccaagcgcctgggccgttctgatccggaaacgcgccgaatcaagcgcagtgcccgtccccaccaccataagctccaggtgcattgcaaagtagagggcaactaaatcgcaggggtttgtgattgacacgaccaccccctgaaagccggatgcctgaatctttggtataatctcatcggctatattcagagcttcctccagctcctcaagcctgttctccttaaatatcgctccgcagtagctgattacacagatatccgcatccccaagctcctcatatccgccgctgcggaccgtggtattctttcctgcatagcatgccgtatcctgaagatccacggcatgggaccacgccttctgtgcatccgtatccagcaggatgatttcctcacagatttcctgcatcataagggcgctggccacatgggctcccacatgccctgccccgattatcactgtttttctctttgacatcatttttctcctcgctgacggtattccttcccgctccttatttctccattattataggaacagaacgattgcgtgtcaatcgctgagggaaagatttttgtaacagttcagccatcaatgtcatctagttaacactatggagatttagttaagcaggtgaggacgccgccggtacggccagcggacggggtggtggggtgtgtgtatgagtctttcgtcccgtgggaagattgtcgttgtttggggctgcggacgaagataaaggctgcggagcacgctcccgctctgtgaaatgcatcgcgctgctaagctcgacaggacctcgctaatcagcgatggatttcaacggcatccgcagcctttatcttcccctccgccccaagggaaggttcgccgggacgaaagactccgccaagtgtatcggccccgtccgctggcctgcggccgctgattgtctcacgcgttaagtgcgggggcggaccttgtctcggccactcagtgctaccgtgtacaaaaaatacgatatgccttcaatgcgccttttataaaaaattgtggaagatttaatatcagcctgacggaaacacgtagtggccgcgacagggtcctccccatttaaggttggagacaatcagcggccggaacggaccatgtccggtgccgcgaaaacctccgcctgagtcttccgtccccggcgaaactctgcccaggggaagtaggcggaatcaattgcggaggggacatgggagtccgccggtgcttggcgaggtccctcacgagcttagcactgcctcgcactccaaagagtgcaaacggtccccgcagcaattcattccggccggattcccccttcacgataacctacccacggggacggaagactcagacagactcccccactacaccggacatggtccgttccggacgcgtcctccaacctcagttaaatctccatagtttaactaaaagagatgatgtaaacgggaaatccccggcgcatatgctgtagcaaagcgtatgcgccggggattttttaccttccggtgattatcatttcctttcatctgagaggagcggagcggctcccatacctggcaaaagcattatctcaatcagacgctccgaacaaagcgtatcactgaaccatgtttcttccgaaaaagcagccagattttcaagtgaatattccagctccctggaataaaattttgcaatttccacctggtcttctgccgataccttcccttcctgcgcaaatctgctgatggcaaacagccgcataatcagaataccggcagccgcaaaaacagctctcgacagaaggtcgcagtcaaaataagatttcaggaaataccggtatgtaaaatatactgcaagatgctcgtactcatattcccggctttcaaaataatttgtaaattcctcctctttttcaagaagaaggggcagttcctccataagccggttaagaagtgacggccatttcggcgatacgggttccagagtacagagaaattgaagcgtatcagcataccattcctgcactttatcacggtccgatgcaccgccttcctccttccggcagccgcaaagcagccctgaaagaaattccggccggccgtacctctcaacgacttccagaatccgctctgccgtctgtatttcaatggcccgtatttcaaccggctgtattttggcgtcggtacaactccgggcagactgcgccgatgcctctctgtattcaccgtataagtccagataatcctggatatcctccgcaagcatcaggtaaagagccagtctctcaccgatccggtattcccggttctgcaataacccgaaggccgtatctcgcgcctccagaagacttgcaaaaagacggggccggccccctcttcctcttcctcttcctcttcctcttcctcttcctcttcctcaaatgataccacaaaatctgccttttccggggactctaaaattaatcttgcggcctcctcacagcacaggcccaggcccatttccgtcagaccgtcaaaccactcatagaatcggggatgttccctgcatatatcgcagagactgctctcccccagttcattaataagctcgcagagattattatccccgagaaacggacagcgctctccctgcaggataaaatgaggcagttcatcctccccctcccgcaggattctgtccttaagcttttgtcccagctctcccggtacctttttataccgctcagccgttctttcatcgatatctatttcccagccgatgcagcaattatctgtgcagtcagaggccgagcattggaaccgttcaaaataatccggttttcgcatctgtattttctttttaccactcacttctgtttgttccttcttccagcatttgattatattcttcccacgggacgtaccttccgcccatgctctccagatgttccgtatggaactggcagtcgataaaaaggtatccgttctcttccagaatctttgccagcgcaatcagcgccaccttggaaccgttttccctctcggagaacatgctctcaccgaaaaaacatttaccgatagaaactccatacaggccgcctgccagctcatcgtccacgaaagcttccacgctgaccgcccagccgttctgattcatcctgtaataggcctcctccatctcatcggtaatccaggtgccctcctcctgctctcttttcatcctgcaccggtgcatcgtatcccggaagtcgcggttcaggcagattttactgtcgtgtttattcatatattttttcatcgaacgggaaacgtggatttctcccggaaagatgaggaaccgctccttcggacaccaccagagtatctcgtcgcccggttcataccagggaaatattccatacaggtaagcaagcaggaggcgttcggttgataaatccccgcccaccgccaggaggccgttctcctcggccaatacgggatccggaaaactgatttctttttttgataaacgatataccggcattttactgttccttttctgttatggacggctgtttcttcttcccggccgtaactgtgaattttccttcacggcagtcaagcagacagtcaccgccccgtttcaggcttccaaacagaagctcatccaccagcagcggtttaatctcgcttccgattacacgctcaatctccctggcgccgtattcctggctgatgcctttttccttcagaagagccttcgccgtatcagtgacggtaaatgccaccttctttccttccagcataaaggccagttccctcagctttttatccacaattgaagcggccatcttatcatccatggcgttaaataccacaatccggttcagccggttgcgaaattccggctggaatgttttcttaacttcctccataatcacatcagccttcaccgttctctcgccaaaaccaatctgcgctttcccaatccggctggctccggcgttggatgtcataatcaggatgatatttctaaaatccgcttttcttccctggttatcggtcagcgtcgcataatccattacctgaagcagaatgttataaatatctgggtgtgccttctcaatctcatccagcagcaggacggcatggggattttttctgatttcttctgtcagaagaccgccctcctcatagcccacatacccggccggggcgccgattagctttgctaccgcgtgtttttcctcatactcactcatatcgtaacggatcagcttaattcccagctcatccgcaagcgtctttgctatctccgtctttccgactccggtagggcccacgaacagaaggctggccagcggttttcccgcctccagaaggcctgcccgggagaatttaaccgcattcaccacctggccgaccgcctcgtcctggccgaacacgcgggcgccgatgcgcttgtccagagtcgccagttttttcacctcatcgctctccacgacctgcttcggaatctgacaggttttagataatatatcgtctatcaggcccttcccaaccgtctgcgtcttctggtcctgtggatggagcttcctgtatgcccctgcctcatcaatcagatcaatggccttatccggcaggcagcgttcattgatatacctggcgctcattttaaccgcatattccaggacacccttgccgtatttaattccgtggtatacttcataatgttttttcaggccttcaaggattttcaccgtatcttcttccgacggctctttaatctccacgttctggaagcggcggaccaggcttttgctcttttcaaaatgttttttatattcttcataggttgttgctccgataaaacggatctctccggaggcaaggtatggcttgagcatattggagacgtcgaagctgcctccgttcactgctccggctccaacaatgttgtgtatttcatcgatataaacgatcggtttatcttccttttggattccgtccataatctcacggaaccgcttttcaaaatctcccctgtactgtgtcccggcaagcagggtgccgagatccagggcgtaaacagccgctcctttgagcggctccggaacctttccttcattcaggaggcgtgcaaggccgtacacgatggcggtcttcccgacgcccggttcaccgatatggagcggattgtttttctccttacggcagagaatctgcatcgtccgctccagttcctcctcacggccgatcagcggattcactccgtccagattctcgttcagacaggtgacatagcgccgccatcttttccctctaaccgtctgctcttcctgttcatttgcaggatccggtccgccgggctgttcttcatcaccggtcaggtccgtctctgtcccgtctttgccaaaacgggcgccggatgtacctgacatacctgatttttctttttccctccgggctttccgctcctgatagcgttcatacatctcatcataaatttccgtcagttcctgaaggagggcggtctttcccaccccctgactctccatatagtaaatggcatagctctcctcaagggaatagaaaccattcacaagatgagccagctctacggcatcttttccacagttatttgccgtctcctgcgcccggatcaggacagtttccagacctgccgtcatctcgggccgcaaatcatcgtcagaaccatctcctgcttcctgcccaaaactgtcgggggcttccccttccgcctccggttcctcccggctgccgtccgcatcagacgccagattctgttccatatattctctcagattatcccggagcatgtccgtatctccgccgcaattttcaaacgcctcccggaaggtatcccgggctgctatttcatacagaagcagttccggggtcacatattcatgatgctcccgtattgcttcatcgaaagtcaggtttaatatatcggccacttctttcgttactctcattaattctgcctcctttgtgggtcttgccgccgctgcgttcccctgccggaacaggctgtgcgcggagcgtacaggtcatcgttgttcttccaccgtcagccggaagggatacccctcctcctccgcgagagccgttacaagcctgatctttgtcagggcaatgtcataggaatacattcctaccaccgccttgcctcctttgtgtaccatcatcatcagcataacggcttcctcttttctcttattaaatatctccatcaaaacctggaccacaaagtccattggtgtatagtcatcattgtgcataataacactgtagcgcttcggctctctgacctgtgacttcgtctgctgccttatctctcctttggttgacatttgaacaccttccacctctgtaattaatttctattgttatacagtataatatatttctggggaaaaaaacagaagaaaaagataggaaatttccttgagaattgaggttgggaggacaagtccggaacgggccatgtccggtgtggggaaggggaagataaagtctgcggatgccgcctaaatccatcgctgattagcgaggtcctgccgagcttagcagcgcgatgcatttcacagagcgggagtgtgctccgcagactttatcttcgcccgaagccccataccacgacaaccttcccccgggacgaaagactcatatacacaccccgtccgtccgctggccgtaccggcggcgtcctcacctcatttatatcccaaatagcgatattgcacaaaaaagtatttgattccctcaaattaattgacaaatctaacgattggaattaaaatagacataagcgaaaatacaaacgctgcttcattatgcacatggcagtttccctgtctactaagcgaaatgaaacccagcaaaaagcagatgagatactctctctccctgttttttactgggtttttatttgtttcaaaggaaaggaggttattaattatgaagttacaggaggccgtagagcttcaaaaggaagcgcttctcaaaacactgcaggaaagcatccggatacgcagtgtggaagatacaccggcggaggacgctccctatggaatgggaatccgtgactgtctggttcacgcattacaaactgcaaaagagctgggattttccgttgttaatctggataaccagatgggctggtgcgaatatggtgagggggaagagatgattgccgtattgggacatctggatgtggtcccggaaggcgagggatggagttttcctccctttggaggtgagattcgggacggaaaggttcttggacgcggttccatcgatgacaaaggaccgaccatcaccgcgctgtatgccctggccgctctgcgcgacagcaagcttcccttaaaacgccggatccgcattctctttggtaccaatgaggaaaccggaagcaatgatatgaaatattacatcagccatggcggagaactcccggttatgggtattactccggacggcgaatacccggttatcaatggagaaaaaggtatcattaatgtggattttaaagcggaatatacccagagtggtccgttgattttaatggggatttccggcggagacgctcccaatgtggttcctgcctctgccgaggcaaatctttgctgtccgccggagcttgcgaaagagcttattcacaagctcactgtcgaatccggcaatgccgtcacctgcactcccacagagcagggaatccgaatcgcggctgccggtgtcagtgcccacggagccttcccggagcttggcgtcaatgccattggccttttattaaccgcgctggacaggctgcctctgtctgagccgcttgcctcacaaattcatttccttgccgaaaaaatcggtctggaatctgacggaacccggcttggcatcgcactttccgacgaaccgtcaggaaaactcaccttcaatttgggaacggttcagggagatgctgcttcctttatcatcagaatcaactaccgttatccggttacaaagacgtatgaggactgcgcgccgatcctgaatcaggctttcgcagaatcaggatttacacagctcaaagaaatacataaaaaatgcctttatttaccggaaaacagccccctggttcagacgcttctgcgcgtctatgccgaacagaccggacttccgccctatcccaaatccatcggcggcggcacctatgccaaggtaattcccaacattgtggcctttggccccattttcccgggagacgaggtgcgggagcataaaccggatgaatttattaaaattgacgagctgatgcagaatgcacatatacttgccgaggcgctttatcagcttgcaaaataaaaataatatacaaaaggagatgtgtctatgtttactattacaaacagctttacctacattgcgttcctgatgcttctggccggaggcctgctggcccttgaaaaatatgcaaaatggaaagtattcaacattatcccgccgctggtttggatttatgtcctgaatatggcattctgtaccatgggactctttaattcggaggcctgttccgccgcctatggtgcattaaagaacaacatactttacgccatgatttttgttatgctgcttcgctgcgatttccgcaagctgggcaagctggggccgagaatgatcgccatttttatgggctgtgccattactttaggtatcgctttcttcgccctttatccggtcttcgcaaactccctgggcggtgctgagaaaacctggggcgcaacagctgccctttacgcctcctgggtcggcggttctgccaacatggcagcaatgcaggatgcacttccggtagatgccggcgcttactcctgtgctttggcactggataccgcatgctattccgtatggatcgcacttcttctcttcgccgtaaaatattccggtaaatggaataaagcatgtaaggcagatacctccggcctggacgccgttgccgctgctgccaatgaagaaattgcaaaagaagccaacatcaaaccaactgctgccgactggatcttcttaatcggagtttccttaatggtttccgcggtctctcagtgggttggcggtcagatgaacacagtattaaaagccagcggtttggctttctttgataagggtacatgtactaccgtattcgttactgttcttggattaatctgtgcgatgacacggatgggcaaacttccggcagtcaatgaattatctaacgtttacctgtatgccatcgttgccttactggcatctactgcaactttagtcgatctcgtagctgcaccgatgtgggttgtatacggtatcgcagttttagctatccacattatcctgatgttcttactctccaagctgttccattgggatctgtgcatgtgttccaccgcctccgtagcctgtatcggcggatcggcttccgctcctatcattgcaactgcctatgatggttcctttgccggtatcggtgtattaatgggagttctgggagctgccgtcgggaacttctgcggactcggcatgggtgcgctgcttcagttcttcatgtaattttgaaaaggagaatcaatgataagcaaaaacaaaacttcgattgtttttactggtgatatcggattcgaccggtacatggacagacgttgggaggacgataaccttttgtccggaccaatcttagacttctttcatagtgcggatcacactgtggcaaatgtggagggagctctgattgatgctgtcgatgacggctccagaggtattttctttcacagcatgaaccctgcggccacccgtgttctgaaactcgctcatgcagatatctggagtatcggaaacaatcacaccatggatgcaggacgggagggggtcatcagcactaaaaacatcgcaaaagagatgggatgccgtaccgtcggcgccggcttaaacgaaaaggaggcctccgagcctgtctatctggaggaagcaggcggcatcggcatgatttgtgttgcctaccagacagaatgcatcccggcaacctcaaccgaacctggcattttccgctgggacgctcttgacgccattgtagaacgcattgccgagattaaatcaaaatgcagatggtgtattgtcatctcccatggcggcgaagagtttaccagccttcccagcccctatacccgtgatcggtacctcaaattcctggagctgggcgcagacgtagtggttggccatcatccccacgtcccggagaactatgaattgttcgataacggaaaagcaattttttactcgctggggaacttcatctttgatacggactatcaacgcgttcacctttacaccgacatcggaatcctgctgaagcttaattttactgaagaaaagatggattttgatgccatcggcatccgtatcgtacgaggtgacgaacgaattgatataacgccccttcccggcatcttcaccaatattccagctaaagagtacgagctgcttgctcctctgggcgcgaaagcgtttgtggaagaagaacggaaaaagatgatctacctggaacccgaacgctttaccgacgcaccggaggaggtttggaatcggtacttcttcagcgaagaaccggatggttattttaaagattctcatatggacttttccgttattcttcctttggctgagaaggccgaggatggggaatggaaaaagagcgggctggagcaggtgaagaattatattctgcggcagttgtaggaagtctgctatattcaccgttaattgcacaatgctgtactagctgtgagagtttggtattgaaattgtattagaaaaaagcagaaagagcctgtggatgttttggcggtaaaagcgctgaattatccataggctctttttgcttttaaattagatgacgctgcatatgactactttcattgataacgaaatcaataaattctctgaatgtaccaatatgttctgttttggaaattctctcaagaagtccattaaaaatatgcagtatcagaaaccacattcggttattttttattgtttctcttctgctctatactgcccggagtcaggattacagtcatgtcctgttatatactttttctccttttcgtaccttattttttattctaccccaactttttccgatagaacacttctttctaaaacatcatctccatctgctccgccacctgtatccgcgacgcaatcactgtctccgcctcggttcctttgatatgttccgtccgcacatactggacggaatttctgagaccggcggcaaccagattcaggacgtagatattgtcaaaccggttataaatggactctccgccaaggcctgacaggcagataagctgcgtgttggtcttctttgccatatccatcagcggctttaaaagatggaccgcgttggtctgggcaaatggattatccatgacgagaacctttccttcatttctgtctgcgaagaaatctgaatcatcccgccgcatatagcagagcaggctggaaaggatgataaaggcggacaaaaagccctcccctcccgagtttctggccacatcggcccaggtgatgggatactccctctgctcctcgatcttgaagagatgaatctgtacatttccaatgccggcaaccgtatcatagagatgtttcgttgtgagctgggtgccaaaatattcctgggcattttcgttgcgctcaaaccattctattccctgtctcgtaatctcgttcagaaagtcattgattctaagctgatatacagtcaaattttcctcccaggaaggaagctcaaggcggagcatcttaataggccgttccctcacggtgatggtagaattgtgatcgattttccccaaattttcatggacatccttcagataatcctccaatatctctgcaattctggctttttccttttccaccagcgaaatatctacctccagcttttccatcaggctctgatacgactgtaccgttatggactgcaaagattaggttaatctgctcatccgcccgtaatctttttcctcctccgtgacccagtaccgcagataaagcgccggtttctttccgttgataccggatgccttcaccggactcagtctcccggaggaaatttcagacagaatatggcggtacagagcttcatatgtttcaaattttccgtttttttctatttcttctaaagtgattcgcttcatggctgatggctccgatgagtagttttcgttacggtctcgttattgtttgattgtatcatgaaatattttgacagtctatatttctggatgctttcttttcattccccttttatggttgttggaagaaaccaaatatgataaattaaacatagcgttagagcgtgtttgaaaattgcttttcgtcagctgtgcgtcacactttgtgggagatttggcccgaatgagcgcggcgtagtgggctacgttaagcgaattcgggccaaatatgccgcgaagtggggcgtgcagatggcggaaatgaattttcaaacaggctctagcaactgaaaatacaaagatagaaaaggaaagaggtattctatatgtctgacaatacaaagattggttttatcggtttcggcaatatggcccaggccatagcggacgggcttttatctaaaaatgcggctgccgctgaaaatatcttcgcctgcgccgcaaactgggagaagctctgccgtaatacaaaaaaacgcgggattattccatgcagggacgcagcagaaacagcggtaaattcggatatcgttatcctggccgtcaagccttatatgatggctgatgtgacgtcaactgttaaaagcatcctgaaagataaaatcgttatatccgtggccgccggctatccatttgaaaaatttgaagagatcctgctgccgggcacacatcatatcagtaccatccccaatactcccgtatcggtcggagaaggtatttttatctgcgagaaccgccattccctgtctgacagtgaacttgctctggtagaaaacatattttccaaaattgcgttaatgcagtttgtcgatacaaatcagctttccattgccggtaccgtcagcggctgcggccccgccttcgccagcatgtttctggaagctctcgccgatgccgccgtcatgcacgggctcacgagagacaccgcatacagcctggccgcccagatgatagcaggaaccggaaagctccagctcaaaacgggcgcgcatccgggggctatgaaagatgccgtctgctctcccggcggcaccacaatcagaggcgtagccgcactggaacgcggcggcctgagagctgccgtgataaatgcggtggatgcagcggaatattgctgaacacagctctgcgagtatcgcgggcagtaatagcggaccacgtataaaaagtgtataaatattctatttttcgtaagaatgctttagatactttttatacattggtcaaacattggacacaaatatccggtatgattatcgtatcaatcaaatggagccaatgattaaaaacagcgcgcacaatgtcgttggcttcgactaacaataattcaaattcagatagatttctgaaagcattttatcccccggctttcagaaaaagaaagagaagtacaagggctatctgcccctgtgcttctctttctttttctgctgtttgagttcaaactgacgctgcttttcagcctccttctgttcccggctgataatcctgcgttctgttttcaccgcttccctctgcatctgcagcgcctgctgtgattttgtcccgataccgacggcagccgtctgccttccggcctctttctgccttctcttcgggctgcgccgcatctctctcagagaaaattccacagccggactgaaccgtaacctgtagtaattttccatcagaaatccgtacacttcataatccttcggctctgcaccgaacggaaacttgcacacggataatccgttctccgtgactcgctccagaacaccaatccagaacggatcctcgaaaagcactcgcatggttaccgatactttgtccataacaattcctccttaaaatgtaatgaacaaagaacggacgaccaaggaggaaggttactgacagcagtttcacgaatattgtctgctgcgcccggactacctaccggggctgtgtttttatctttgctgttttcatactatctgtttttccgtcgcctgtcaagaacggtatgttccggctaaaaattaaattcattctcccacgcaaagtccgcagattcttccctgctctttggccagtgcccgcaccattccggcaccttcggagactccaccctgtccatgctgggcgtatatggcttgatatccagcacgggcgttccatcgttggcatctgtatagtcaattcttataataccttttttcaaatccaactgcagtacctctgccgcagtcagtgcaagcggattggggcgggcaggggatctggttgcaaatatccccattatcccggggcgttcttataaggctgctctgcttccaaaattgcccttgccgcttcgttatcgcattcactgaaccaccagatcacattgatgtggctgaatccgtccagagcctgcagagccggacggtattccggcaggatttcaatccaggctccattgtcattgttacagattgttccgataggatttacattgcaggttgtcatattattccctccatttatttgttgtaaatccagtgtaggccctgacaccgtgtgagagtcaaggcatgccttaaagcattcctgttcacggccctgctgaaaacgaagcctgtaaacagtcaccttaaatcttctctatcggaatctgtatttccaccagataattctccggctctgcctcattccagggcccccggtggacaatctgtctgttcggaccgctcatcctgtatctgccgtcctcctgaagccacccggcaaaagacagataagctcctgcaatattagaaaatgccccgtataccattgtggaggccatatacggcacaggttctgttatacggtacgtaaaaccttccgtattttcccccgccgttctgacggcggcgcacagttcaacatcaacgttcttttctttatactccgtgtcatggtaaatagaaaaagtcacacctgatacgggtatctgatgttttgcggcatatctgctcatttcctgccacatatccccttctgcataataatccggtatgattttcctcagggaaagaacgtgacaggcagggatgaattttatcgcgacattataatgcattccgtttttcctgcccttcaggatttcacattctgccagctctattttcttcagtttttcctgctccgcccgtatagacttctcaatttccgtatatttacgggaaagcagacctgcaatggcagtatcgtctgcattgtctaaggccgcggcaatttcggcaacattaaaaccgctgtcccggagataaataattttattcagtatgggaatctgcgccgacgaatacattctgtaaccggtccaggcatcggtttgagccggtttcagcagccccgtctcgtcataataccggagcatcctgattgatacctgggtcaatttggagaattcgcctattttaaacatgtccttcctctgcccattttctgcactgtgtcaggcggggttccgggtcatacccctgatctgttcccatctcagccagcatcgtacatggaaaatcgggacattcgccgcagtggttcagttcctttccctcgcagcagactttcacttcacagactccgccccagaaggttttttccatattaatacagcccttacaatgtaccttctctcttctttcacaactgtcgcaacaaactccgcatctcgattcgaacatcatgttcctcctttgtgtttaaaaatcacctttatctacagtaattatttctcctcctccagatattcctcccggaatcccttcatccatttggcaagtgcatcgaacagcagatactgctgctccagtattgaccttccggtcagcggcacatttgttctctccgcctgcttgtccgcaacggttttttgcatgacttcaatttcctgttccatgcgcccggtcagctctctgcgttcctgctcagaaacgagattgaggctcatgatgactgcattaaagtccagaaaaagccggattggctgccgggccgtctcctccatcagcttcagaaaaaactcttctcctgtctctgtgatctgataaaccgtcttttccggcatctttccctctttaacggtcttccctctgatatagcctttttcctccatttgtacaacttttttgtaaatggacggagtgctgacctttacccatttggaaatattccggtactccacgttcttctgcaattcataggcgctctgaggctgcgccttaatcattcccagtacgattaaatctatggctgccatttctcatctcctgttcttattcatttaccgttatttttatttcagcttctttatactttataatactataaaatataccattgttcaagtctaaatttattcccgttttgatgccaatctgcttgactctcacccagcgtcatagtttatcctatattaagagcactggatgggacctttcgaaaccagtgtaatcaagacaaaaggaggcatgatatgaacacgataaaggaagtaagcagaataaccggtgtcagcccacgcacactgcactattacgattcaatcggactgttaaaaccggcccgggtcactgaatccggataccgcctgtatgatgaagcttcgctggaacgcctgcagcatatcctgctgtttaaagaactgcgcttccccctcaaaaaaataaaacagattctcgatagtcctgacttcgaccgcaatctggccctggagcagcagctgaacctgcttctgcttcaaaaggagcatctggaaaacctgattgacctgaccaggggtatccgtatgacgggagttaaaaatcttgatttttctgcatttgatgcgaagaaaatagatgaatatgcggcacaggccaaaactgcctggggaaaatccgctgcttatcgggaatatgaggaaaaaatgaagaatagaagcgaagaagactgtacgtccataaaccaatctttcatggaattattcagtgaattcggcaggcttaatgccttatccattctcccggattctgatgaagcccagagcctggtcgaacaactcatgcaatttatcacggaaaatttttattcctgcacgccggaactgcttcaatctcttgggaagatgtatgggggcggcggcggattcactgagagtattgacaaaaaaggaggcaggggaactgctgattttacttcaaaggctatcgatatctatgcggacaagcactcctgctgctaatgaggaagcgataactgtatgctccgcgcacaggtcaccgccattaatacaaaaggctccggttgagggaccggagccaggtaggataggcagggtgattattcatcccatatctgttaaacgtttgagaattctatttgtaacggtatttttactaatttattaattttattttgtaaattgacttcctctttcattccggttacactgaaattatatcatttatattatcatatatgcaatagtaaatcagaaaggaaagccctgcacagaaactgcaaaaaacgcagttgattgtggtgaaaagttcacttttcatcgcgccgcgagtgtaactcgggattttcgtgcataatacacacgaaaaacctcgcagaatatgggccgtgaatagtaacatatgaaactctctttatttcgaaaagcggcaatttattcaagccttgtattttccttattcgccttatcaggctgcagcgcagaatcagtgcagcaaacagcgtcagcgcagaaggatgaagcttattccctttccgctgcggctgggaataaagccccggaaggacctgtaacagtaacttccccctctcccggtatagattctggttccggccagagcgcggaaaacaaagacagcttctctcttatcactcctgacggcgtttctcttcaggagcggatacagacacccggggggtatgccaggacggtatcagaagacggcagctttggctggtatgtcaggaattatccgatggaaccggacggttctccgattctgctttatgacggccgtttgaaatcacggcaggatgtggggagcgccaccttctcccttccggtcatttcatctgccgatcttcagcagtgcgccgactccgttatgcgcatgtatgccgaatatttctggcacaccggacaatatgataagatccgttttcattttgtcagcgggtttctgtttgattatcccacataccgggacgggggacgcgtaaaattcgacggcagcacggtaaaatggcagaattcggcttcatacaatgactcctatgaggcctttgaagattatctctacattaccttcgcctattccagcaccttgtcgatggagggggaatccgcccccgccgatataaacgatatccggatcggggatattttcctgaaagccggaagtcccggccacgttgtgatggtggccgacgtctgcgagaatgcagagggagaaaaagccttcctgctggcccagagttatatgccggcccagcagttttatgtccttaaaaatccgcttcatgacaatgacccctggtattaccaaaaggaagtttcctatcccttctccacacctgaatacacattttcggaaggcagcttccggcgtctgaattatatagattaagattatataggcaaaaacgccgtttcgcgaagatatacttgagattttcgcgaaaacctgtgaaaacgcctcgcggaatacatcatggctgaactgttacggattaagagcaacggatcacccctgctgtactccgccggatgattttacctgtcctctgcttaggccgcgggcgcccagccggttcatcctctctgtcatcgtgaacatccctgcgacaaacagcagcaggtagaacggataaagtccgataccggcccactccgacacaatgccgaagaggggaggcatgagtgtggtccccacataggcgcaggccatctgcatccccatgaccgactgtgaatatttcgcaccgaagttctccggagtcgcgtgaagaaggctgggatagatcggtgcgcagccggctccggtcaggattaaaccggcaagcgtcgccgcattccccatcggaagcaggaataacaacacaccggaggctgcaaaaaactgtcccaggcgtaccatatttttatcgccaatccggtcggtgataaaaccgcagacaaaacggccgattgtaattcccagatagaacagggaggcccactttgccgccttgccggcgccgattcctttatgcagaaccatatagctgccggcccacagcccggtcgtggcttcaagggcgcagtaacagaaaaaggccgtaaggatggctttggctccgggcagcttcagggccgatttcagactgatttcctcatattcctgctctgtatttccatcgctgccatttccggttctccacagtgaaagggacagaagcagaatgatgacaagaacaacctgaatcactccgacggcctgataacctgaattccatctctttcctcctgccaggcataagcccatgatataaggcccggttgtcgcgccaatcccccaaaaacaatggagccagctcatatgacgtgatttataatgaagggctacgaaattattcagggcggcgtccacactccccgctcctaatccataaggtatcccccataaacaaagctctgcaaaggaatgtgacgcggaaaaaccaaaaagggccgctgccgtcatcgaggcgctcaccaccgtcacgataccggtgccgaatttcctgattagtttatcgctgaacagactggacacaatggtgcctcctgcgataatcatgctgataatcccggcataggataccgccacatttaactcaccgtacatggacggccatgccgaaccaagcagtgaatccggcagtccgaggctgataaacgcaaggtaaatgataatgagtaataattgaaacatattgtcctcccggagtattcgcatattttttcacaccacgctgcttcccggaatgatgtgaacagcgctataaagttactgttcacacggttgtgttccgcgaggcgttttcgtgcgtattctgcacgaaaatcccgagttacacggcgcgacgcgatgaaaagtgaacttttcaccacaatcaactgcgctttttgccgtttctgtgcatcgcgaagcgtgttattgtttacagcacgccgctttttggcggggtgtgaacagtaacgctacaaagctatgttataagaataccgccttttttcacttgattctacataaatccggacatataatataaaaataccgactgattttagtattactattctcggccctgctgaaaagcgctgttccgcggacagtaagattgtagttcaaaaaaggaggtctgaatgggactgaaagaatgcggtcttaatctgagccgtgacaataaagaactgaagccgcacggaactatcgattttccctgtgccggttattcttccagctatagggacagtgaggatgatatcataccgtggcattggcatccggagttggaaatactttatataaagtccggaaatctgaaattaaagctgcccgaaaaaacctttcacctgactccgggagatggatttatcgtcaattcgaatgtcctgcattatgccgcggcagaaccgctatgcgagcttcattcaatcgtattcagccctctgctgataaccggctgggagggctccgtctttgcggaaaaatatatcggcccgctggtccgctgtccctcctttgacggatgcagtcttaaatgtctgttccccgaaccggagatgtttgaaaacctgtttacggcggcgtttcacgctctcgcggaagatcttccgggatatgaatttacattgagggaagctctctccaaactgtgctatgccctctgcctctggttcggacctgaaaccggtgaagactgcccggctccttctccagacgcagagcgtctgcgcagaatgctggattttattcattgccattacagcgagccgctgaagctgccccaaattgcagaagccgccgatatcggcgaaagagaatgcctgcgttgtttcagccggatgatacaggtatcgccaattcaatatctgctcaaatacagagtgaaccaaagcgcctccctgctgcttcgggaaccgggcaaaaacatcaccgatatcgcaggcgggtgcggctttgacagccccggcaatttttcccggatattcaaacgttattataaatgttccccaaaagaatacagaagcagaaataaggaatgatacatccctctttccgatatattttaataaacatttctgaaatggacttttgtatctctatgaaaaagcttctcaaattcaaaggcaaaaggctccggaccccagacacccgcttccggctgcctcacgtcggcaatcacccgctgaaaagccattttccaaaaattacggctggaaagatacctcgaaatcttttgacaaaaaacgttttgacaagaaaagttttaacaggaaaagtactgccgaccgcagccatatttgccctctccttcttcatcggccgggcggctgcccagaccgtggaacctcaccgttctgccaatctggctgtggaatcccaccgcagctctccggccggagaggtaggagacgtcatcaccgcttctgccgacggcaactggggcctgagtttccagaccgaggggcaggcccccatcggaaacgcaaccgccgattacctcaaacaatacaatgcctactatgtccagaatacgcaggataaggtgatttacctgacctttgacgcagggtttgaaaacggcaatactgccgcaatcctggatgcattaaaaaagcacaatgcccaagccacctttttcctggtcgggaattatcttcagaccagccccgatctcgtaaaacggatggttgcggaaggtcataatgttggaaaccataccttccaccatccggacatgtccaaactttccacaaaagatttatttgaaaaagaactgactgatctggaaaccctttatgagcagaccaccggccagcccatgaaaaaatattaccggccgccccagggcaaatacagtgaaagcaacctgaagatggccagtgatatgggatataagaccttcttctggagccttgcctacgtggactggtatgaagataagcagccgacgaaggaagaggcctttaagaagctgctcggacgcatccatccgggcgctgtcgttctcttacatagcacctccaaaacaaacgggcagattctggatgaactgctgacgaagtgggaggaaatggggtatcattttgggtcgctggatgatttggttgcggggcagtgaggataatggatgaattgaaaatcagatgtgattaggtgaatggtaagatcttgttgataaatggggggcgatttgcaagagagcatcacacaatcattcaaagcggatgattgtgtgatggctttattttttgtgaaaacatttagaaaaatacttggataacatacattgcatgaataaagaactctatggcattgtacggcactccatcattaacgtgatttatgatagttgaatttatagttactatgattttattctatagcaaatttttcgaacccatttgcttttacaagaaatagaaataaatagaaaactcaaaatcgaagtaaaaaacattaaaaagaaaaattgcataggcctattattatatggccaatctaaatatttatctattgaatacattattataatatggacaaaatacaatccaaatgaaattttggaaataaaggtaatgattttacacatagctacatttttaatctcaattccaattaatactttgaataaaaatatagatgaaattaatataattggcgattggtattttaataaaaagttcatctctcttgaatacgcaatatattggaaccatacgcttatactaaaaaaaacgataaaaaaatatatgtatcttaattttcccatgttcttcattttatttatcaaatagcctgaaaaaacatacagccaatatactgaaaataaatcacatagacttattgaaaatgtaaatgtcttgttaatctcaaatagtgcaagtaaagcattgatttccggtatcaacattccatctacaaaaactaagattagtggtaagaatatgaactttacagaaaatccacttaaaaaaacgctaaagaatggaagaattatatacacacataatatcataggcatataccacatactcccgaagcttctttgattgacaaataaagcgttaagtaaaattccatctaaactttgtcctgaatcccaagaaagatatagaaacatgataagataccaaaattcagtggttattaaaatacctccgacattttctttataatattttttaattgaatcattatctgtaaatgtcctatttaatacaagagctcctgtcaacattaaaaaaatgggaactccaagtcggctaaatacgctgactccagctttaaatagcatggaaaaattggaacttgagataaattctccaatctgatcattataattgtcataaaccatattaacagcatgatttgacataatagaaacaatcgcaatagttctagctaaatcaaatgatataatacgattcttcattcgcttttactccccatataacctttacgatttaatttatctttaataatatcatgctctaatgtctcaattagctttgacactaaccataaaccatttttctcttctgcgctcattgaataatttctggtatttattcttttcacaaattcatttacttcatatcgaagaccttctccctcgaatttataaaagtattttttagtgtttcgtaaatcctcagttcttacttcaaaataatccgttttccaccaaggagcaggcacatagatataaccatccgttccagttataatcatatttccctctgtttttatacccttacccaatttaaaagtggcagtccccgttgtcagtaaaagttcaccttttagaaagcgacaaaattcatctaaaaattctcctcttagatgtatttccactgtttctttaccaaagatactattaattggcaaagccgcgtatgaaccgaaatcatatatacttccaaagtacttattatttatatccaaactgtcaggaaattgactacatgatacatctatatccaatatagttcctataattccagagcgaagcaataaaatcatgtgctgaaaggctggaaaataccgtgttttcagtgcttccataagtactaattttttattttcagctcgttccataagaatttcagtgtctgtggaatttaaaaacataggactctcacataaaacatgacaattatattctaacgccatgtctatatattttttattttcatctcttgcaacagcaatatatacggcattactttgtttcaatagttcttctgcagagctaaatattaacaaatttgaattgatttttttgatcttatctactttgtttttatcatttagataaattccgcttaatcggattccagatacatatttgatttcctctatcatacgttccaccggaacttcaacaccaacaattcctaatacaatttcagaaaacgcactatttctaagtgccgtgctagacacaccctctgttcgatctaaataaaccacttcacaataattttttaaataatcaaattttccaatccaatcagaacccaccgtaaaaatatcgatatttaaatcaataatatccgaaatcttctgcccttcatattcttcaacaattatctgatctgctaggcctgtttctttaattgcaataatcctctcagataaggattgtcttacattcatcttccctctgtttttatcaaacaaatctgatgtaacacccacaataagatagtcacccaatttttttgcacgttttaaaagacgaatatgtccttcatgcagcaaatcataagtaccataagtaataacctttttcataaagctccctattcatattagtaaaaaccatggctatgccttcaagataatttcttttaaagcttctaccaagatatgattatcttttattgataatgctcccatatgtccaaccctaaatacgcgttccttcagttccccgccgttaggacatacccagataccataatcattttttaatatttcaaagattttataggctgaaattttattagtaactaatgcagttgcagcgtttgacattgacgatgaaaaaaaggagaacggcaacttggaaattctgcttctaaaatcttctgccaacgcttttgtagccgctatcacttgttctggcccaattgtatctatctgttttagcctataatttaattgaagtagaatcccaacggcaggagtatagggagtctgtcctctctccccattttccaatgccgcttttaaattaaagtacaatgatttaatagtcccattttgtattttttcgattgctttcggtgataaaactaatgcggatattccaggagcaactgccaacgctttttgagaacccaatatcaaaacatcgatcccactattattcacattaatttcatctgccaaaaaagaactgattgcatctacaataaggaatacaccttttttcttgcaaaatctgctaactaactccaaatcatataatactcctgttgaagtttcatgtaaattgattaaaaaacctgataaatcgatattatcgtattttttcaaatgttcttcagtcaatacttccccatattttagttttagatctatatatggaattccatgtatttcacatatatctgcaaagcgctgtccaaaattcccaccattaactacaagaacattgtccttcggcgtaaaacagtttatgaccgccgcttccattgccgcagtacctgagcccgttaaaaataccgttctataaccgattccaataccagcaaatttgcctatcaaactttcattctgtaaaataatagaagaaaattcctgtgtcctaaaatatggtacgggctgagctgcactcttcacaatctcttcatccatttgaacaggtccaactgcgaaattaagcattgttctcttctcctctcattgtataaacactttgcatgattcctaattgtaaaggatagacccccatccaccccagattttcaattttatctgattttaatgctgaacattccatgacattatatccacgctgttccccttctacgggcttctcgctcaaaagctccacctttcctgcacttgaacattcctgagcaaattcccggattgatacgattgagtttttatttgagatattataagcctcaccagtttttcctattaataaaacggtcaaaattgcagaagcacaatcaaagcaatggcaataggaacgtaactgatgtccaccacttttcattataattggggttttattaactgcgctgcgcaagaactgagccgacgccctagaatcctcctctgtctgggttggaccatacacatgtcctgggcgaacaatcactgtttctaaattatattcacccatataagagcaacacaatgtttcagctgcgcgcttactgcttggataacatgaacgtatgtttaataaatccacataagaataatcatcttctccgtaaggagaaacatttgctttcctatttccatatacttcactggaagaaataaacaatgttcgctgaacacccatgttttttgcatattcaagtaaataataggtccccaagagattggacatcattgtttcaaccggttgttttataatagcactaggatgtgcattacttgcagcatgaatgatataatccacacgtttggaataattaaatggtaaaagcgcatcatattcaatacagtgaaaatattcgtaaaaaaaataagactcaaatctattcttgagtctttgtactgaacgtgatgctgcatagatttgaatatttagcttttctctttcattcaatgtaataagcatatcaattaaagctgaaccaattaatccacaagaacctgtaattaaaatacttttattctgtagatctgattttttaattattttattagatgccaattgaatatcattgaaatatttgtcagtatatatcatattatcccctagctgtttattttagccattccgactttctttccctgagtagtgctttaaaaatgtcaatatcatcaactgttgtaagtttaatatttttttcagatccattagaaaaataaatcggttttcccatttcaatcattaacgtacaagaggctacagaattagtgatccccatctttaatgcctgtctgtgcagttcacatattttgctcaaccgaaatgcctgcggtgtctgtgtcctcttcaaatttcctcttggaacactcttcaatgagctgatttgatcatcagtttccagcattgcttccgcacatggtattgccgtaatggcacatccatatttttctgtcttcacaatattatccgatataatttcttgggacaccatcggcctaattgcatcatgtattaatacaatatcatccctatcataaattttttccagttcataaactccatttcggatggatccttgcccattctcacctcccggaaaaatatgttttagtttagtaatgttaaactgttctgcatatgccgctaaaattttttcccatccttcgatacagaccactgcaatcacatcaatttccgcatgtttttgaaatgcctccattgtatatacaagtaccggtttatcatacacatttaaaaattgctttggtatattctgatgcattcttgcacctgaaccgcctgctataattaatgctatgttcattcttatttcctcccaatatagtaatcatatttgtttttaaacttatatttatacgttaataattcagtactacctaaaatcaaaaaaattgcaaaccaaaattgtatttgcagaagaaaatcaaaccctcccatggcacttccccttggcataaaaaagatcccgcttatgcttaacaaaacaaacgaaaaatggaaaaatccttttttcataaaatctgtaaaatagattagaatgaatcctaatataatgttaaatataattaggccaataaagccataatcacaaaacacttctaaaatataggatgaacctgttccatgccccttcaggtattcctctcccagtagaacataggataaatgatgagccatgctatttcctgaaactgcacgggttaaactattgccctcaggaagcgcgcttgtttcaaaaataatttgacctaatcgtccatataaaaagtaatctatgaatccaccaaatgtatagttatgccatactccttttggcaattgatccaaagcccccatacctgaacaaagccaggaaaaagaaaccccctgtttataaaacaaatctctgataattccacttattccactcgtaattgcaacattctcacgaatgtaattatatgctcctaaaaatatcaatgagattggtgcgaatataaaaattgcagttttctctactatccctatccatttttcctgagcaccatataaatcacgaatgacataatagacaaacgcaaataggatgtgcaacatgataggatttctctctccaactatcagatctggtactgctgataatacatatagagtcaaaacaaaaaaagcactcttctttttaggaagagtggcaaggaaaaaacacaggctataatttgttaatgttgatatgacataagtcatgtaaggtagcgaactttgaaatgtactaaagtactctgtataagtatgagattgtatatatactactttttctaatcccctcgccaacaaaaaaaacattgacactataaaaatgaaacaagatataaaccttagattctcacggaaattataattaacacttgtgatgttgctatcctttcgaaaaagataatactggtttcctaacaatgcccctatccagactgcatacaacgataccaaaattgctattagccctaatagtacatttgcatttgcataatactgctcagcaacgttagcaacccagtcgatacctgtaaactcactaattaatggtcgatctaaaaggaaaaaaaacattgtaaggttaaatccaagaaaaattatccttcttctaaaatgctctagtccatacaaaatattgtttatccatatcaaaaaaatagctattaataaataaatatacggataatcatttattaatgatacgtaaatacaacttaatgaaatactgacaataattattctaaatagtttccccatattttacctcttcaaaattgatataatccgcctccaggcattttgcatttcatctttttcacttataaaattcacaaataaataccagaaagttgaagttataccaacttcaatagcctttataaaccattcgtagtaagtagataccgtcagcttaagaaacttttccacccagaaaaaataaacaaaaaaagcaattagattacgtaggattctaacaacagttttttttatggttccatttaataaataacgattattatagtacagaacatgtgcagagctaaatatgaatgctgccaatgtacctattaatacgccatttattccaaattttactaccaaaagtattgcaaccattatattaataattgcttctactactgctctccattgcgtctgcctatattgtccgaatgcacaaataattgtaattccaggtacacgaatacaactcgtaaagcctattaaagtaaaaaggattgatgttaagggccttatataatttgtatctgaaatttccgcagtataaagctttataaatggaatatacagtaagcctaaacaagtaaatgcaatatataggagtataaaaaaaacatattcataatttgaatatgctttatataaagtatgttcctctctctttgaaacaacctctccaaaaccagcactaagcgctgttgaaaatgagctgacaacagtctgaatcaaatttaacaccatctggtagattgtatatacgcttatttctagcaaggaggcttttcctataaataatgtcataattacaatattagtattattcaaaacgacgccagctatttgatggactaatgcggcccaatgttgagatagtgcattcagtttagggcgtacattaaaatttaaataaggatatttctttttaacataggaataaataatacctgaacgaagtatgtatacaaaagtagatattagtttaacaataacaatactacatccataattcatcaaaataatggcaaatacagtattaagaattgtacctaaaacttgtgtaagtaccactatgtatcctttttgatctgctgtcaataaaactcgatatttccctaaaaataaataatcaaccaaattgctaaatgataatattgctataatccacctagtgatatttggctgtatttgttcactaattaaatatgggtagagtataagcaataatagtactaagattgcataaagcattcctgactgtaaatagaattttttaactgctgataaaactccatttatattttcttgattatcatcagccaagggagcatacaaactcactatcgatgccgcacttatacctgcctccacaagcattaaataggccataaattgtgaaaccgaagataccatcccattcatggctgaaccatatactaataaataaaaccgtggaagcaacaatccgctgatagcagttactatctgaagaaataagttggaaaccacatttttgagggcctgtttacttctcatatttcaccttcaacttttctaagctcaaggcaattgccggaaaaaaatagtatataatgaacaatagttgcctttttcttgtaatcccatagcaattcaaaaatttaaatcttttttttctgaatttattaattaaccattgaaaatctttattttttgaattcactccactgcgtaccattttaataaagattcttatcaggctctgataccatttaaagtaagcaagttctatcaaatcaggatattcattaataattatatttaaatttttattacatgcaaatatataatccaaatctctatgcctgtattcatcattggttatactatcacatcttgtaacataatgataaaatggttttgaactatatgaagctgttttaacattcctgacaatatcaaaaaatataaacaaatcttcaaaacgtcgcttcataggaaatctagtatcaacgaatagtttcatactgtataatttagtacatgcaatgtgcgcagtcagtttatcttcaaaaataattctaaccagatctattgcgttaaaaattataagttcatcatcattcgatgtttcgtttttttttcttattcgtccttcaggttcatcaagataataattaaacataaataaatctacatttaaattatttgtgagttcattcatgtaagacagcatcccctgctcaatataatcatcactatcaataaaagtcacaaagtcaccagtagcacagtctaaccctacatttctggcatctgataagcccccattctctttgtgtattactttaactctgccatccatttttaaataattttcacatatcaatccactctgatctgtagagccgtcatctatcaatattaattcaaaatctctaaaatcctgtattaatatggaatcaacacattttgtaagatattcctgaacattatatacaggaacaattacacttatcttaggcattagttcccccatcctctctaactttttgtatcttaacaccatgtgtttttcttttacattttggcggaagctgcataaaatcaccatatagattagttagatagatatgatattttaaaggtataggaaacaaatatccctcaaattcagctttactctgaagcctataatcatcaaatttccaccgttccctttttccattaattccacttattgcggcaacattaatttcacagtgagaattgaatagtttacaaaaaacattcgttaaataagccagtcgatatcttccaataaattttaatataggcctgagacagtctcttataaatcgtttaaattttgttgatcctgtatgatagtctgtattacttatgtccaataaaattttcaaataatgcagtattaaacactgtatattgaacagccaatttttttctggtacaaaatctactggaaatatatcaatacctaaataaggacagtcttcttttataacaaaatcctcctccttataataatccgttcttacaaatctcgcataatctcttgcaaatgttttattatttaaagaaaatatttttctattatttattctcatattcattgacgctttaagaagcagttcatagtcttttcttaaaagcattacatctgcatcatcatcccagggaataaatccatgatgtcgaacagctcctaaaagcgttccgccacttagataataatttatatctaagtctttgcaaagtttatcaaaatctattaggagttctaataacaatgaatgcagttctccaagttcattaaattcacacattaattatatcctcgtaaattatttctaaattatgtcctattctctcctcaattggtggaagttccatataattgccatatatattttgtaaaactgatttttcacactcaggtccaacaaactgtttaccttcaaataaaatttttttaccttttcctaaccaagctttaggaaaagtctctctaaaaccaatagatgctacataattagttacgatattgcaatcatcaaatgagtactgttttaatagtttctcaaactttaataatgcttttttgtaattcatttttcggtttccaaataaaattttaccaattactatagcaatattcattggaaatttccgtttacgtttgatatcaactgcataattaaattgtgtcaattgtgtccacattctagaatagaataatctagtcatatgtatacattttgctattttattatctggaagaccgtctaaaggtataatatctatccaaacgtattgtttttgtttttttacggttgagtggtcaataacagccaatgaaaaattgcagagttttgtgagattctgtctacatttgttattattataaatactaattataccaaactgactatttaattctttatctgatacttttaaaaatttttcataatctttccttggcatagctacatctacatcgtcatcccaagggataaatcctttatgccgcacagctcctaataaagttccgccaattaaatagtaccttaaattattactaatacaaatatgatgaaataattctaatagctctaattctttttcttgcaatattccgagactactattgtttacattcattatctttcctctttaatgtttgctccattctttttgatctcccatatacgcgattacttaaattagtttatcttaagattttaacaaataatttatatcttaatttactgggaatcatacatactattagctgcatcaaaattgtactcaaataatcaaaataagtgatataaccggtatttaaaatttttcttcttccatttctatagttacaaaaatacctccatccaccacgccgcattatcatagacatccctgttctaacataaactaacacttcatcaatatttttcccgacacatccacactgtaacatatcgcaccatagtaaatcatcttcaacaaataaagcatctttgtaattgcctgcttttaatacagacgattttttaaacattacagttacatgattaaacgcacttctctttttttgatatttccggatatccccgttgcatattggtacttttctgatagcaattttatctttaatagttccgtcaaattcacagatataacttccaactatatcaagagcaggattttctttgaattcttttaattgccgttcaaaacgctcaggcacacaaatatcatctgtatccattcttgcaattaattcatatgtacagttcttaatgccttccgccaatgctaatcctaaccccttattttgtttcagaggtatgatttttagaagtcccggatattttttcttataatttataattgcctcatctatttcgacagaaacaggaccgtcttgcacaataacaatttcattcggctgtaccgtttgttttaataaactctccatacattcattaaaataatccgccttttcttttatatatactgacattaaaacactaaatttattatccattctgactcccacttctttacctaaaaccctacaaatattgctttaattaataagagtacctcaaacaaagtaatatactttgaaaaccgtatcagcctccccatcgctgccctcaaaaaccattccagataaatcttgtcataaacatgaatttatctgagacacttattttttagtgtttagatcaaaataaaacccttttaatagtgataattatagtattaacctcaagtaacaatgagaatctatatagaatatcgaggttccaccgcatcttccccggcaacacccgctccacataaacctcatctgcactcaatccctcttccattccctccgcgatgagcttatcttcatccttaaactcaatactggcctccgaggtcacccccgccggcagcagcagcgtcgcatacatctcttttgtatactgtttcacatacttaggaacctcgggccgggttccgacaaatgtcatctcacccttccagatattgataagctgaggcagttcgtccaggcggcagcctctgagtttttttccggcattggtaattctggaatcgtcgcctacagtcaccaggcttccgatttggtctgcattctgcaccatagtgcgaaacttgtaaatccgaaatcttcgtccatactgtgtcacccgttcctggcggtagaataccggccctactgagtcccgcttgatccagatagccagcgtcaagaataccggcgataaaataatcagcatgacggacgacatcacaaaatcaaaagttcgctttaccagcaggccgaaccaatgtttttttaatacctcataataaggcctgacttcttccgtacgcataaatccaggcagttgttcccatctgcaaagcatgtttttctcctcaacctttttcacaaccttttcattttcaccgtcttgatttagctgttttatatccccctctgctatttcaatccgcctatttctctatccatatccatttttaccaatttccgataacatcccttaaacgtatctatcacagcctccgcctgctcatccgtcaggcaggtatgcagcggcagcgtaatctcattctcaaactgccgatatgcatttggataatccttaatgtcaaaccccagctttttataggccgtgtgcattggcagcggcttatagtggacattggccgccactccggcctcagccatatctataatcagctgattacggaattcgagtccttttccgttcagacggaccaggcaaagatgataactggaatgaacctcttcgccgttctctgccttgtcatgcataagcatatcaaccggcagctcgctcagtccttctctgtatttctcaagtatctctttcctgcgcgcaagtatccccggatatctccgcatctgagctaatccaatccctgccataatgtcagtcatgttgcatttataggcaggcattacaatgtcgtattcccaggctcccagctttgtcttggccagggcatctttgttttgtccgtgaagagacagaagcataaactggttataaatccaatcgttatcgatgcccggaatctcccgccagacaagcgcgccgccctctgctgtggtcaggtttttcacggcgtggaaggaaaagctggtgaaatcggccacttcgccgcacatttttccatctctggaagctccgaatgcatgggcggcgtcatccaggacaatcacacggccgaatttttcctgtatttcattggacggatgaaacagacctttcttcctctccacaatctcaaatatccgccggtagtcgcacatgactcctgcaatatccaccggaatgatcacctttgtcttatccgtgatagccttttccaatttctcataatccatctcataagaatcgggagccgtatctaccagaacaagcttcgccccgacgtggcagaccacactggcgcttgccgaatatgtataggcgcttgttatcacctcatccccgggcccgatacccagaaaatgaagcgccagttcggcacaggctgtagctgaatttaaacacacagctctcggcgcatggacaaatgctgcaatctgcttctcaaattcttttgtctttggtcctgtagtgatccaccccgatttcagagcctccacaacttcattgatttcttcctccgtgatatccggcggtgaaaatggaactttcagcatacgcagcttcctcctttttatttcagcttcaattcagctgagccttttcttttatgtttttccaaaaacgataacctgcacgctccgcgcacaggtcaccgtaatcaataaacgagtctgccgagactgactcttacgccagatccggccttttagcggccatactttggcgcacaggcattggctcatttacaggacgcactttccagccaaacaagaatcccgttcgcaggattctccgcctgcggcgggccgctgtagcgacatgattcttcctgtcaaataaaaaaaggacctcctcagtccttctccaacttaattcccagcattgcggtttgctgctctccgcgaatcgctgtttctatgagtgcataccgctttctcaaattcagccgtatgattttttccttaaaatattccagcggcccgtccagccgctcgatttctccctgagcatccagatacactttcgtattcctaaccagataataacctgcgcctttgtcagcattattgacgggcgattcatttgcgcagagcagctccaaaaatttccgttcttcctcttccagaggaataaattctcccagattatctcccagaagctttgaaaattccggtattcgttttaattcatagaatacctcatcggcattcgttaaatctaaaaatacataagctggaaacaacgtctccgtcacttccagccattctcccccagcctcttaagaagctggcgctttagaaaaaagcattctttataaacagttttcggcagcatcttgtacaccaagtccaccagttcctgttctttccctgttatagtttgaattacataccacatttccagtatctcctgacccgctttcgctgggctagagcgtgtttggaacataaagaagccagtaccggccttccaaactgccgatgttgagttcaaagcctatttttacgtatgcttcgccatttccacagcaaaaagcgctctgaacccactgttccttatgtccttacctcgtcttcatatgccccactagctttatgaacactgcgtaattttgtcttatcctattctccgggcagaatctcaattcccgcccagatatccttattctcttttaccggtttcaggtttaaaacggcaattcgtttatgaagatctaatttccgtattaaagcttccttccctgcaagcgggccatttaccgccctgaatgatccgttccggaccaatccccttgacaggcccatatgatggcgttctccgcaaagtgtccggatcatcgcctcttcttcaggctgcacagggagcagcatatcttcctgagcaaggacatcggtgatatcccgatactgtttcagctctttcaacagtaattccggtcggctgctctgcagaaatacgtaatcaggaaacatcctataggtatctacatgccactctcccagatatttcttcattctttcgtaagagaattgaaacgcatcatcaagcgccggctctgataagtgatgtttacaggacctgataatagcttcttcctgaccagacttgcagtgtagtacataccagcccactgaatacacccctttctgcctacaacataataggtattatgttgtcaaatgatacactatcctgacggctgtaacaatcttacacatgtttatggctttcaaccggaaatctttacaaatatcttaattaaaaaatatgaaagccaaaattgtgtcataacaaaatctatagatttcttatttttttatattaaacctttcagcagcatttgtacaagccatattctgcatgtccactttgattccggctctaacaacataatacctattatgttgtatctcccattccaatcccaaaccattatccacaaacacagtttcggaccgcatccccctttcccttcaaatcaccagaccgagcagttccatctgtcttctgtactctttccctgaagtagccgtataaattctcgtagtttcaatactgctgtgtcccatgatatcggccagttttaccacgtcctttttcaactcataaaaggttctggcaaaaaggtggcgcagattgtggggaaatatcttctgccattctacatctgcctccccgcatagttttttcatctcacgccagacattactccgatccactccttttcctgttttggtaataaacacttctcctgttttcagtttccgttctcttatatatagaagaagctgcttttgcagtttgctgccgatgaaaacgatcctgttctttcctttattatagatacagagtttccccttccgaaccgactccaccgtgaccgatttcagctcgctgatgcgaagccccagaccgcaaagagtctgaagaatcagcgaaagctgcctcttccccatgttctgtgcagcccgcaccaggcggtaatattcctttttattaagctcccgctgttcctcgcagaacatctgcctttgaatcttgaccggctttacacgaaaatccgtccagtccataaagctgaaaaagctattgagagccgccagcatcgaattgacgctcctgacatgataaatggtgaggagattacgtttaaactcaataaccttttctttcgtaaccgctttccggcttgtatccgctgcgctgttccaatccgcctcacaactctgctccctacggacaaatgcttcaaacaccctgacatcatgcagatatttgtctaccgtcgccttagcccgctcttcttttatcaaatattccttatacctttgcagcgcttctttatccagaaacctgctgccctcatctgtcacaaacgaccactcccttctacatatgccgcaaaccaatggccttcactatcaaggacgttttatcatcctgacatttattttatcataataaaaacggaaaggcagattataaatggttccaggaccattgatacaaacttaactaataaaatcgacgtttattagaccacgcccggttataatgagcatataaagttaaaatttgaaggaggatattatcatggaattatatatacaggaagaacaaatcagtgagcatttacaaaagcggctcgagcgcttccgggctgattatccggtagcggatgaggtgaaaaggcgcgtctccaaaccggatatgcccttcttcggaaaagagattcttgagatggctgtttccgccctgctggagggtgaaaatatcctgctttgcggcgataaggcaaccggcaagaatattttggcggaaaacctggcatggatgttcggaaggcccgtatacaacatgtccttccatgtgaatacggacagcggcagcctgatcggaagtgataccttcgtcgacaacgaagtaaagctgcgcaaaggcccggtctatcagtgtgcggcctacggcggatttggcatcctggatgaaatcaacatggcaaaaaacgacgccgtctctgttcttcacgctacgctggattaccgccgtatcatcgatgtgccgggctatgacaggatcgagcttcatcccgccgcccgctttatcggcacaatgaattacggttatgccggaacaaaggaactcaatgaggcccttgtctcacgttttatggttatcaacatgccgacgcttacacaggatgatttgataaaaatactggataccgccgttcccggcgcctcatctgcctcgctggaacagtttgccggcctctttcttgatcttcagacaaaagcgaaaaatggagagatttccaccaaaccggtggatttgcgcggcatgatcggttccctgaagctgatacgcggaggactcacccccaaagcagccgttaccatgggcataaccaataaatgtttcgatggatttgaacaggagattgtggacgacatcgtcctgacccggattcccgaatcctggagcagcagggacgtattttagaaatgaggcgagcatgatgaacaggaataatggtacagaaaacactgtgcctgctgaagatatgtctataaaagagatgcctgcaaacgatatatcggaagaggaattggagacagcccgcattcagaaccgcctcaaaaacctgctgtggaccataagcggagattacagcctgggaactgaagtgaatgccgctgttttcaaaaagtccaagtatatcgctctttatgacgcggtctgtaaaggcggctttgccagatacttccggccccggaccctggagcagtattttgaaaaggcctttctctacggcgccgagccatcggtgcttttgccgctgtcccgcctctgtattgaaagtgcggtctggaaaaaactggcggccgatcgcggcggcatagccgagctgcggagaatggcatttgaggataccctgaagaaagagtccggacgtctgacccacacggactggggcgccctggagggctgttatctgcgctactgtctctacaaaacccctgccggaaaatcaaaacagctttgggttgacaagatcgtttcccttcaggatgcgggtgataccattgatattatccgctgcctcgacgaagtgtataacggagcctatcccaagggctttgccgatgaattcaagggctttggcctgttcgaggagaatccggggcgcggcaggcagtccggttcggaagaagacgaggaggacaaaccggagaaggaggaggaccgtatcgtcaacctgctggatgaccatctgcaggaagaggacgacggcaaaaacaaggcgcaaaagcctaatgccgtcgtcctggaagatgaatccatggcgctggcgaaagactatattgagctgaattatggaaagagttatctgacaccgaaagaacagcgacagctaaattatcaaatctgtacgggcgcgcacaaagaatgtaagctgcatttttcagacgggctgctgagccgccctgacgcttctgcagaagggacttcgccggcagaagaacagccgcctctccaggacagcgccgacacttatcaggtggaatatgccagaagagttctgacggaaaatctcgaaattctgaaggcaaaccagcttatgacaaggcagaatatcctgtcactggccgatattttaaaacgagcgcttcttaccagggaagaaaaagaaatttttcccgacgaatacggaaaaatccgggttgacaggctctggaatatcggcagaaccgacaaccgcaaaatgtttgacagggaatttattcaggaattcactgattttgcagtggaaatcctgatcgattcaagcggctcacagcagatccgccagagcctggtcgctttgcagggctatatcatcagtgaagccctgagcctggcggaaataccgcaccgtgtcatgggattctgcacgttcggtgattatacggtgatgcggcggtaccgggattatgatgaaccgattgaagccgataaacgtattctggaattctacggttccgccaataaccgggacggacttgcgatccgcgccgccgcccacagcctgtcggcccgcagggaagagaataaaatcctgattgttttaagtgacggaacgccgaacgacatcattgtcagcaaatcaaagagccgtctgcgcgtccagtattgcaatgactatgcggtcaaggacacggccagggaagtgtacagcctccgaagcaagggaattgccgtcatgggcatctttgccggagaggaagaagccctccctgccgaaaaacagatttttggaaacgagttcgcctatatacgcaaaatcagtgacttctcaaatgtggtgggcaggtatttaaaggaacaactgatggtctgattgatggcggtgacctgtgcgtggagcgtgcaggttaccgcttctgcggagtatctgagcaggttatcccagcccttcggcttcaagaattttttcaaacctcttctccgacaaaatttcattcgttataaaccgaccattgtagaacaggctgtatgtggtaaacggagccggagcattcctggcctccccggatgtcttaaataagactgccttaaatgggatattcttctcctctgccgccgcttcaataagaggaacgtattttgccgtaaacggacattgtctcgtataatagaggacaaacccattctcttcagtacgtggctgccttacctgctccttaaactgcggttttggcgcatccgcctcaaagggcagatagaaaagttcaaaatacggttcggcgctgtccgcccggataaaacctttatatcccaggaatttcggatccgacaggtagggcatcttctttttggaggtcagaaccaccagtcccagcctgcccttttccctgctgtcccggatgcattcctcaagcagcaaattcgaatatccctggcctttaaactgcccggatacccacagacagttgatatacatatatccgtccgcctcgacaggcgcccaggctttctccgccggcatgtactcgataaaacatttgccgcggacatttcccttcagaaatacgagtccatcctcaaactgttcgttcagccagttttttttagataacacctgacaatccttattgtttgaaatggcgcagcagatatgctcctgttccaggttatcctttgtaaccgatattaattccattcttttctccttttaaccgcccggtctgtgctgccctgctgctctttctgaccggatggcgcagtacggtcttcagcttatccggagccgtttttctcggatccccgaggtaaatttcatgatgccgcctcgtttcatttatctccgtctcataaccatttgcttcaataaagcgctccagcttttctattgtttccggctcatcatcataggggccgatatgcatcacctgggcgcacatcccctccttgtaccggagcagacgtacgttggaggtatctgtctccggctttttcgcaagacatacctctttcgcccattccagcacttcctccgtgacaaagtcaggctgcctgatcagggaggtccagcagaatttactcttatccgttatcattttcccgtcaaagcctccctcttcggtgtgccagagcccttccagcggaggcaccacataatcaaaatatccgggcggacatgaatcgctttttttgctcatctttatcgtataggaaagtgcataaagcgctcccaccgcatttttataatcggcggatgtattggggtctccttttccatctacagccaaaaataccatttccggtacatctgcaaattcaggatttctgccgggctggtacagtgccttatcatgttttttgaagtccaccttttccatatccgcttttcccttcttctcctgtttttgaactgattgcttttcctctgcccttgacgccttatttgccttttccctgctcttttccccttttttcttaccgggcttagacaccggaagctctctgaatgtctccgccgtcagctctgcaagaagttctctgtcgtcgatatcctcgaccagcagatatggttttgagccttgatagggaggcacttcctcataatcaggacacaaccttctgcctgcttccgttattttaataaaaagctggttttcgcagatcagaccaacaattttaccattacagtaaattccgtattcgccaaacatctttttgtaagtaatctccccggccgcacccatctgctccgccgcataccggacaaattcaagactagaagccatattttcacctccctatgtgaatcagcttattcgttacaattcagctttcggccaaaaaacgccgttaaatttggtaaacagttcacttcttattccttcaaccccacgtaaatatgaatctcagcctcatccatgctgccgtcctgatactcctcaaaatcgcattcaaagcttcttactaaatccgtgttccatatttccttccagcactccgccactgccttgtgcagatcacccttcgccacaaattttgcgtatttcccggccggaatcgttacaataaccgtaccctctggaatcgtctccttaccatccgtctcacaggcggtcacaatcgtataatccgatttttcattcccggcatattcggtataaatgcccaataccttttcattcacttttccggatatcgcctcataatatccctgcgagtaaaaattcccccacagtcctccgattaccgcacccatatcaggcgacgtattattggttctggccttaattcccactgctttcttttcttctaattgaacgatttcgtaattcatttcatattctcctgttttcagttgtttttcacggctaaacaccgtttcgcgccgttaaactggggattttactcaaaagctgagtgaaaacacttcgcggaagggcagctgtgaattgtaactgcatcataccacacgtaacatgacaactatatgtcatgataccagggtcaaaagctgggaaatctgatgcaagcttacttgcatgaagatttttaaccttgggacccgccaaaaacatgagtaagaagccatttttcgcaaaaaatgagcggatcgcgaatgtttttgaggattgtgtgagcacgcagtgcggagcaatccggtatcaaagggggcaaaagaccttttgaccccaacatcagatcatcattagtaacagttcagccgctctctcagcttcagcgttattccccgtatatatcctttagtcttgccatcaactcatataattccctgcgcagttcctgcggctttgtaagctctaccctgtcgccgaagctgagcagccagccgaacaggttgtcccgatcggtaaaaccaaaagagaacttaagccttccgtcctcctgttccgtaaaactgcccggaccgtactcttccaccagcctccatttcatctccggttcgaacagagcctccacctctatctctgtgggaaagatccgttcagcagccagctggggagccggcatctgccttggttcatatgtctcctctaggccggcggtctccgtcattctgttcagcttaaacatccggtaatcctgtttctcacagcaatacccccacaaataccaggatgtccatttaaatataagaagatacggttcgacaattcgtctgctctcaccgcccggagcatagtaggtgaacgccaccttccgccggttctcaatcgccgtttgaaacagactgattttgggcgccagggaagatttataccatgaagccagatcaatcataatgtggttgttggacgccagcacggaattattgccagaagccagcttctccatgagctgctggtaccgttttgtccccgaaacactgtccagacttttaaggccggccagaattgcctgcatgtcggaagaggtgagcagggttttatccatcctgtagccgtccatgatggatatccctccattctgtccctgcgaagttacgacagggattccggctttgcagatatcctcgatatcccggttaatcgtcctgcgggatacttcgaatttttcggccagatacggcgccgtcaccttttcctgctgaagaaggatggatagaatgccgataaggcggtctattttcatgtgtttttctcctcctcagccgcatctatcggccttccgattttcatttcctgtctccactgcggagcagtaccgtcgtcaccccaatattcatccagcgctataattttcccgtctcttatctgtataaatgaggttacatggaaagacagcttccaatcagccgaccacacgcggactgccgtaatcagcagatttcccgcctgctcggccctctctatttctccgtcccacgagcctgggtattcgcagtttgctcttatgaattcttccacattgaaaagctcattcgtattatgccatttaatccatgcattatcatgaaaatacgctctcatggcctttgcatcctgacgcagagtgtccctccagtatccctctatatttatttgatttgtttgctccatctgatgttctctcctgacttctttactttcaagccctgcagcgtgtttcctgactgtcattggcacttaacagattttcagggctttcttgcaagctgtaaatctattgtatcgtatatagttatctttcccccgaatttttctatcgtattttcaatatctgaaaaaaagtcctttcttatatgctcttctaaagcgatatgatcggaatacgtacctaaaagtccaatgtattccctcgcagtaaatgttctcgttctgcaatacagataatatgatatatctgtaaaaccgtatttttcagctatcagcgcacatttttctgccttctcttcaccatattcctccggtgcatgggaacccggcatatatacttcatatatcttttcaatttcttttgacaattcctccctgcctttatcaaaaaacggatgattggcaaaccgggcaaacacgcctccatttttcagcatattaaatacttttgtatatccttctgcctccggtatccagtgaaatgcagatgccgaatatattaaatcataggtatgggagttttgctcaaactcttcaaatctagttgttactactgtaaatcctgaaaatttcctgaactttcggcagcacagatccgctaaattcccgccgcactccacagccgtcagactgcatcccgtttccaggaacggcagggctgcctgccctccgcctattccaatttccaaaacatggctggctccattaattgggatgtaactgaaaatatcttcatataatgccggaacataacccgggcgcattttttcatactgttcagcttctgtatcaaatgtccattccatccctttcactctaggcccccctttccttcccatacaaatatgacggcgggcattatttatcccggccaaatcaaggctgtttctattttaccacgtacgaacggacatttctatacaatcgaatggatagccataattcgccaacggccctgttgtaacagttcagacagcatgaccgtgttacggttcatggccctgccacaacgataacctgcacgctccgcgcacagatcgccgtcttcaacaaaagggagcaaaagctctatgctttcgctccctcagattttccgctttatatcataatttcacattcacttcatcttcgttccagctatttccattccaattttcatagctggaacattcttgctgcggctgcggaatacaatttctttgtccttatacaagcaaaatcctcctgatcaatgacaggacagctcccgcgccgctgcaaaacagcagagtcccgcgatgggcattgactgctgtcagcgcggcccttccgccggccgctatcccctgccattccacgacgacgctgtctacgggaggaattaccgtcagtgcaggcccggcggcaaaaaccatagccgcacacagcagaaaaggaatcaggcctcttcccgtgtcatacttcttaagacgaaaccctcctcccgctccttttctggacaggatccacaaacaccagatcacgcccataaacagagagattccggcaaaacccacatacagcgcaagaccgtaattgcgatccgtcaccaatgtctctatatttcccagaccttccccgtgtgcaaggaaggagcgcagcatgatggcaaccatacagcccataagcagacatgacactatctgcatcacacggactgctatcaccaccgctccggccgctccttttaccgctatctctcccagattcggccctgaatcggaactgccgctttcatcatcctctcttctgcgccgttccctgagtcgttcctgcaccgtcagacgctccacttcactctctagatcccgcatccggctgtcgcgaagtttcttctctttctgctcaagacggacttcttttttgttcggtccgctccctgcggcagcttttgaagaagcttttttacccgaatccttcgggcagctttttggggcttatctttttttctaagattttcccgtttctcgtcccgggtttccattctttccggttcccgggcataagcagtcccgaccggtgtacgccgctccgctctggcctcttgtcccgtctctatataggattcccccgaataaacggttccaggccgtccgcgtctgtccgccctgtatcgtcccgcactgtatccttctccgccggttcttcatgctccggcgcccaggccctcactctccgtccatcctgattctgtctgtatgtaggattccggtcagccggagaatagttctgtttcagaagggctccgcaattgctgcaaaaattcccggtcgtctcgtgtccgcattttggacaaatcatcgtatcatccctttcgtatctcagctatgattatgctgcctgtaaaaatcctttcgttccggctaatcataacatattgatgcgaaaaataacagcgtcatttatttccttaaaaaaagtgtaagtttcttgttactgttcgcatggtaacgtcccgcgaggtgttttcgtgtgcatctcacacgaaaatcccgagtttcacggcgcgaaacggcgtcttttgccgtttctgtgcatcgtgaagcgtgttactgttcgcagcacgccgctttctggcggagtgtgaactgtaatgtttcttgttactgttcgcacggtaacgtcccgcgatacgttttttaccacacgcgggcaccgttctcatcgactatatacccatccggcgtcagggtatttgtttgcatgtctccttccggccccagataataccactttccttcccattggatccagcctgtcaccatatagccgtccgcaccgaaatagtaccatttatctccgctgcatgcccagtcgttcaccggacgggatccgtccgtattcgtgaaacgccagcccttttcattctgtatccactgccccggcacacgctccgaattgttcagaggtttcgcctccccctcaggctgtttttccgtatcagaagggctgatatagacactgtccgactccgtaaatttcccttcctttaccccctctccgcctgcggcgcgcaccttgtaataatactctccgtccttacgcatggcggtgccgaaatcaaaggtggtatcggacgtcgtctttctgctgccgaccgggcgctcatcgcggtagagatagatatcatagctttccgctccgatagccggtgtccaggatgctaccgtgccgtcgagccatgcgtcttcgatcccgccgacccgccgggacattggcctgagattcaaagtgattgtcaacacctgcggctcctcactgtatacagcataaacattcgcctcatcgcccttaatcctgaccccattctggggactgaaaaatagttttcatcctcggtcacaaccgtaaccgtcactctcggaatgtcataatactgccacgtataaccactattctctatttcccagctcttcaccgaatagttatcggcgcccggctcaatggacagcgcttcatcctcccccagcgcatcccccggctgcatactgtcttttatctccagacgtattgacgtaatcctgccgctttttgccgcgaatgcggtcatcgtcatcatgccggacagcgcagcggccgataaaagcagggcagcacacttcattttatttctcatcaatccgtttcctccttactgtcagcttaaccaagccgtttatcaatagaataaagagtctgccccggcagactttcgcaccggagcgcggtcgctttagcggccatattccttggcgcggagtgcgcatccccgggggggacttttatctcacaggaacactttcctatgagataaaaatggtgcggctgactatcccgccgcaccatttttccagttttactgaatccagactccgtctgcgtctaccttgtatccgtcaggtgtcgtcgtattcttaagaagcattccgtttgcagaaccttcctccatgctgaaataataccattttccgtcgatctggttccatcctgtcatcatacggcctcttgtaccatccgaaaccggattgagataataggtgcgtccggatgcgtccgtgtaccagccggtcatcatgtatccgttctggtcaaaatagtaccatgcaaatttaccgccgtagggcagatatccccactgggaaaccggtctgaaatcattaaaaatgtacatccagccgcctgcatcctgtacccagcttccgtatttggagcctctgtcattggaaccggaagaagcacttccgctaggcggcggcgttccgccctcgaaccagacagcccattgaggatcggcagccttgtaacgctctgctaaagctgcttcattacctgtaggtgaaaaatcaatcgtcttttttgacgacgtacagcctttgaacacatctcttcccagaacaggcggtgtccctccattgtgcagatagataatcagacgatttaaagaggtacatcctgcaaaggcctcgtctccgatgtgattcgcaatacctatgctgacccaattcagctgtgtacaatctttaaacattccggcagggatgttaactgccgtataaagcctggctattcgcagggattttggtacggtggctccttccgggatcgtcctcttatatgcgcttgtctcaatccaatccggagttcccatctcgagttcctgaagccccgtcagtctctgcattgcgtcccagtccgtctttgtaagcttgctgtcgttcagttcaatacgtatcacatcgcttaaggctcccagccggccaatacggtcaataatctcatccatggtttttccggtaagggtgcctggtctttggcctaaaattccataccctatcttcagctcgccggtctcctccccgtccggtgtaaggcccagtactctgcgccactccgcatcccaggcgtagagccgtttcgctgcaagaagggcgtctccgctcacctcattcccccttctgtctatgaaggaggcggtaaacctctgctccgcttcaaaatcacccagaagggttggagagttgtaggacggaagctccagcgcaatattgttaagtccctggaacgcgctgggagaaagctggtacacgccgggaatcttaacctcagataacgcggtgcatcccgcaaaggtgaaccctctcaaataatcaaggcttggcagatcggccactgttaattcgatgcagttttcaaataatctttctccggtatattcaagctgcggcagtgctaccgaagttaagctcgcgcagtttgcgaacgcgctgtcaccggtgctatacagcttcggcaggttcaccgcgctcagtgccgcacagtctttaaacgcattgtggctaatgctgtataaggacggaagatctatggaggttaaggccctgcagtttacaaacacgctttcaccggcgttatacagcttcggcaggttcaaagcgttcagtgccgcacagtctttaaacacattgttgcccatattgtataaggacggaaggtctgcagaggttaaggccccgcagcccgaaaacgcgctgtcctcaatatcctgtacatccggagccgtcagcccgtctaaagacacggctcccttaaaggccttctccctgacctttgtaactcccggcatgctgacttttttaagcttcgtaaagtctgcaaacgctccggtcgggatttcccaaatcgtcccctgcatgctcctggtcggactgctcttcgctgcggtgccgtcgtagttaatataaagctcctccagcgcctggtttcctccggttccaccgatattaactctgctaagatccttcgacagatacagtttctttaggttcgggagctccatgagctgcctccactcgtccgaggttatatcgcccttgtttattttaagctctgttatcccggctttttcttcgccgcttagtccgctcagatactcactcacgctgaagtaagtcttctctccgcctcccttgccgtcgtctatcccactgtacatcggaagatcgaaccatgtgtagcctatcagctcacttccctttctcagctcgacattaaaggtcttgtcaacatttctaccgctctccgccttcaagcgttcgggaaccgtaagctctatgcctccgtttcctccggtcccgctttttaccgaaggcgcaaaatctttggccacatccgtgcccaggttaccgtcctgtctgatcttcaaagtatatccgttattgagatcaacctttcctgcctcgcttggacttgcgaacctggataccggcagcaagtacttctggttcaccctgtcgtaatttggggaagaatagtttgccgactcaacatacatgaaccagttgctccggatctcaatcttgccctgaaactgcctgtcttcctccccggcgcacaggcccaccgtgagaggaaagcctccctgctcagtatacgcatcatccagagccggccagaaggcgtcctgatcgtctgccagacggaaactcagggatgagtcaaacttattgtaactcagttttaaaagctcgctgggcgatgccgcaagcgcttcagaatcagaagccatcacagcgtttgccgggctggcaagcattgccttcccgcgctcatattctacgcgttgaaaataatcagagccaagtctattctctgtgtaaaacacatacggcacatcattatccttaaataacccctctgctttttttatccccgctgcaaacgccgtgccgctgaacattgttcccagcatcgacacgatcagcgcggtactaagcatgcttcggattttcctcttcatacccttttcctcctctttctgtctcgttttaccgcttttcccaattttatcacaaacagcatttactgccgccgtactgtgcaaaaagtcacgttttgcgatacaaaaatcaatcgtttgccaccccggtacggacgccgtttttcagacggttatgtctcccatccgctgttcagaagataatcgaaatacctcttcctgattttctttttttcacggaccttaatcgggattatatctccgttacacatcgtaaaattattgtctgcatccctgatgtaatccatattgacgataaagctctggttgcaccgcaggaaacggttttccggcagttcttcctggacatcatctaattttttccggatggtgtgctccactcccttgctgcaaaccactctcagattcattcttctgctttctatgtacaaaatatcatcataggcgattctgcgcccggagcttccgcttatcatcagcaggctctgcctgaccttcggatagtgctcttccagaaaatgattcagcgcctcccccatccgcccctcacttaccggtttcagcagatagtcggtggcacggacctcatagctctccaccgcgtaatcaggagtggtggtcaaaaaaataatcgccgcattccggtcatacctgcgtatccgttttgctgcgtccatcccgtccatatatttcatgtagatgtcaagtatcagcaggtcatacttctgtttcccgctctcatacttctccaccaaatcttccccgcattcaaaatactctatcgttaacggctcacgcctgtttttcatcttttcctgcaatatctttcctaccagtatccggtctgtcttatcgtcatcacagattgccgccagcataattccactcccctgtctgctcttcttaatcttttaagattaaggcatccctgacccaatttcaacacgaatgggacagacggctttatcaggggacgaatggtgtgattttttcattaccgggagctcgcagtggctgctgactgtgcaaaggcaggtgaggacgccgctggtacggccagcggacggggtagtggggtggttttatgagtctttcgtcccgggggaaaattgttgtgagttgggactgcgggcgaagataaagtctgcggagcacgctcccgctctgtgaaatacatcgcgctgctaagctcggcaggacctcgctaaacccccatgcctctgattcggcaccaccataaatgaaactgcgaggacggcaggtgattgaaattgccgttgattgagcttatactgacattaacggcaaaaatcggcactaatttgggcctgtagcccgttcgctaaactgattttaggtactctcatttgcaccaccatctgtccagccgcttgcggcagaaggacgtacagtaaaataataatagacagagtaccgtgccgtaaattttattttggaggtaaccatatggataaagtttacgacaaatgttgtggtattgacgtgcacaaaaagctcatcgtcgcctgctttagaaaaggcagcaagcaggagttacggaactttggtgcaacaaccagagagcttcttgaattagctaactggcttcagaacggtggctgtgaaatggtcgcaatggaaagcacagcgtcctattggaagcctctgtataacatcctcgagtcttctgaactaaaggctatggtggtgaatgccagccatatgaaagcagtcccggggcggaaaaccgatacaaaggatgcggaatggattgcggagcttcttcagcacggattattaaaagccagttatatcccggataaacagcagagggagttaagggaactggtccgctaccggaaaagcctcgtgagtgaacgcacccgggaattgaaccgactccaaaagatgctggagggtgccaacataaagctgtccggtactgtatctgacatcaactgtatgagtgcgcgcaacattctggaataccttctcaccggagaattcttcgacgaagcaaagtatgatgaaatgtataaacagaaaatcattgcccacaatctcaaagccagcaaggaacagattatcgatgatttaaatggtgtcatgaccccattacaacgtcgaatgatgaaagagctgctgtcccatctggatgaactcaatgttcatatcaacaatctggaagatgagattgataactttatgaaaccggaagaaaaacaagcgacacaagcaatccaggatgtaactggtatcggaaaaaacagttcccaggccattatttcggtgattggtacagacatgagtcgttttccaaccgccggtcatcttgctgcatgggcaggactatgtcccggcaataacgagagtgcccaaaagaggaagaccggaaaaatgcgaaaagggaatgctcttttacgttcaaccctggtagtctgtgcgcattccgctacaagaaataaaaattcgtacttttatgcgcagttcatgagaatcagttcccaccgtggaaaaaaacgggcttatgttgcagttgcccattccatgcttatagccatctatcacatactcaaggatggagttgttttcaaagatctgggtgctgattattacaaccaattcaacatggaacgtaaaattaatgcgtacctaaagaagttaaaagcgcttgggtgggaggttccggtagttgccgcctgaacctgttagctgagttcaaaataaacgtcaaaaaggttgatggggaagtctgcgcttttttggcttcccagaagttaaagtttcacagtaatcagcgatggatttaggcggcatccgcagactttatcttcccctccgccccaagggcaggttttcgccgggacgaaagactccgccgggtgtatcggccccgtccgccggcctgcggccgctgattgtctcacgcgttaagtgcggggacggaccttgtcgcgaccactcagtgctaccgtgtacgggaaatacgatataccttcattgcgcctttatgaaaggcgctggatttgatatctgcctgcggaaacacgtagtggccgcgacagggtcctccccatttaaggttggagacaatcagcgcccggaacggaccatgtccggtgccggaaaaatcttcgcctgagtcttccgtccccggcgaaaaactgacccggggaagtaggcggaatcaattgcggaggggacatgggagtccgccggtgcttagcgaggtccttcacgagcttagcactgatgcgcactccaaagagtgcaaacggtccccgcagcaattcattccggccgaatttccccctcacgacaccctccaaccggggacggaagacccagtcatccccctcaccacaccggacatggtccgttccggacgcgtcctccaaacctcagttaaatctccaattaattcactgttgactaaatgacattgcgtgtgaacagcaacacaaaccgtacacgctggttgaaatattcttgcggaagccctccttctatgttttaatattaagtataatttattttatcttctatacaacttaacaaaggaaaagtatgaatatgaaaatagcagtttgtgatgacgataatgcggcactcagccagctatcacgatatatccgggaatatgcggggaagaatcttctggactataccgtattggaatttgatagcggggaacttcttttagaagccgccgcggtggaccctgacattcggattctgtttttagatatctatatgactcccctctccggaatggaactggcccaaaaactgcgggacagaggaaatgaatgcgcgattatctttgtaacggtcagtaccgaccattacgccggaagctatgaagtcaatgccgttcattacctggtaaagcccattacctgcgacagaattgacgcagctatggctaggtgcggtcagcttctgtctgccaccgccagatgcgcttctttcctttccggcggtgaggaactgcggatcccgcttaaccagatccgcttcgccgaggtattccggaacaggactgtcattcatgccgaaagtctgatttccctgcgatgcactctggaaaatactgccaggcagcttgacgacccgcgtttcctgcggatacacagaagctatctgttaaatatggactacattgcaagaaggtgcggcaatgatatacttctgaaaacaggggaaatggttccgctaagcagagccggtgaaaaaatctttgagagggaatacggacgttatctcaccagttcgatgacaggtggcattctatgaaaaaatacaggctgataagcgctgcggcgatatctctgcttctttttaatttgctcaccgctcccctcacggcaatggcagtcgtacccggcacagccgggataaccgaacggccggatacggcagccagttcaagtgaggctgaacctgataacggatgggaagacggcttcggccaggagcatgataaaaacgaatacggcgaaggcagcatcactgcgggaaccggtggcagtacagacagcggcggtagctacgatgctgatgatgaagaagacaccgaggttttggaagatgaacttctgcccgcctcgccttcatcactccttctccccgcccaaaacgatgaagcagaatactccttttgcggatatgacttttactatgcggatcgccccctagaactggaatttgggtatgagtttgacgaatataatcggccgccggagacggtcgacctgtatctggacggaccggacgggcacatagatgattattttactctgaacgttgagtgggatctttcagatgtggatttcagcaggcccggaagttatctggtcacaggcagcttggatacggatgatttaccttacctgcttgactgggaacaggttcctcccccttcctttacgctgaagattgaaatgggaggcatactctcttttcagccgcgaaacgattccgatatcctgtatctcgactttataatgaacggggagcccttcgcacttccggaacgcatgctcaccttatacgaaagcagggatggcggtgagaactggtatgacataacgccaagttcccgggtacgggtttctaaaaccgggattgtcatcaccggcatgcacaaagatgctattttacaggcaatcggtttaaacctcggcggattctgcggcacgaattccgatttcgtaaaagtcaatgtggacgcagggaatgtcatctcttccgtttctgtcatttcatcggacggccttcgatgggataccccacgtgataactggcacgactacactttttcagagtcggacggaccgtttcgtatcctccgttatacggccggatcccaccagcagataccgcttgagaccactgtaataaaggaccggccggagacgctgcggcgtgatttcttttcatcagtaaacgtcttttacggagatcgacccaatggcttttggagtaaaaagctagaccggccggttcctgtgcagtgggactgggatgcggttgactgcagcctggtcggtgacaccgttatttacggaaccttttccggtgaaaccatggagcaatacggagctcttctcgattttgaatcgatgcctgtcccggcgctcactgtctccgtaatttccgatgcattggtcgacgactttatcatggaagccgactggaaccggcttctaaaaaaccagaccgtttatttcgacttttataaaggatatagtgatgaacttcaatttgaggaactgtccggcctgacagtctggtgttcatatgatgccggcctgaactggtatgatattaccggactttccaatgtaaagctgggccaaacctctctgtccgtctcccaattaaagaattcactcctcaggaggcagggatactcattccaggtggaacaaaaaaaccggtctgatattacacctttttccaccgcgctgaccatcgaacaccagcctaccggtgtcaatatcggtcatccttccggcggagatcggggaggcggcaagcggtggtccaagccgcctgaaggcctgttcgagggggacgtgacagattctccggatataaaaccggagccccccggtacagagccggagccgcccgtcatcgccccggaacctgatgagccttccggcggcgagccccctggaacagggcccggtgacgcggatgaaggcaatcataacggcggcgggaacgacagcggagacggcaacggcagcagcggtaatagcagtaacggcggcaataacggtaataccagcagcgccggcagcggcaataacggcaataccagcggcgacaataacggcaataccagcagcggcgataacagcggcaacggctccggtgaggaagcggataggaccggagaaaccggccccgggactgtccgccctgacccgctcccgttttcagccgcacgggatgccggcctttcactgtcaaaacaagaaatctccaaaaacagatcggacgcaaagccgtctggtgtaaagcattctcaaggagccgtcaaacgtcaggcacaaagcacacccaaagcggccgcctctcagacggccgctacagtgaatgaattgcctgaaacagtatcgccgggctccggaacgattgatacattcacagttttcaggcagctaatcggcctgggcgcactcatcttgggcggcctggccggctattggatgataaggaggcggtaatatcaatagtaaaacttacaaaaaacggtttctttatctgacagccgccctcctctgcgcttttgtcctttttacgctgcagtaccgctttgacaataagtaccgctttcccggcattcagggttcacacggcattcttaacctgagccgggaaaatcgtgacgatattctgaccatcctgacttacggctgggaattctatccccagcagctattggcccccggagaatttgacggacacgaaccgttctatacttatcttggagaatacggaggctttgaggcaggcggcaggggatccttaccccacggctgcgcaacttaccgcctgaccgtcctgctcccgcaggaagaaaaaacgtatgctttagaactgcctgaaatctattcctcctcccgggtctggatcaacggcagtctggccagccgtctcggcgatgtggataatccgttagccgccccctctgtccgaaccggcatgttttcgtttcaggcggccggacaagcggagatcgtagtccaggctgccgattcccgccattattacagcggaatggtctatcctcccgccttcggctccgtaaatgcagtttcggatcttatctcgttccgattcctgcggaccggtctcatggtcgtatcttcctttacggtagggctgctctatctcctgattggtctgaaaataagagctgagagaaacagaatggtcctttttgccctgacaagcttctccttttcactctttgctgcgtacccgctcttccatctgttcggggccggattctggtcataccgattagaagatatcagcttttatctctttctgactgcggccgcctcactgcattgtacactttgtaatattaccggccggccgcggcggatcgttctcggtttcagcgcggcgccggtcctgctggttctggctgtacccccgcttttggggcacagtctgaatgccatgctcgtgtattccctggtgctgggctgcatcaaaatgatacttttcggctggcttatcatcacagcaatgctgaaccgtgaacagaccgactccatgaactgcctccttctttcagggctgtgcgccatagcggccgggctgttctgccaggaagcagcccctgtgtttgagccggtgcgttttggctggcagacagaaaatgccgcttttattttcattattcttctggccggcgggttatggtacgatatggtcaaagcaagcacggagcgggctgttctgtcggaaaatatccgtcacatgaaacgccagttttctttgcaggaagaaaattaccgcctgatttccgacagcttcgaagaaacgcgccggatgcgccatgatctgcgccatcacatgaacacactcagagaactggcaggtcatcagcgctacaaggacctggcggagtatttagacggttttgcgtctgctcccgcagataccggttctttgtttctctgtgaaaatcaggctgccggcgcggttctgtcttattaccggcagttggccatgcagaaacaagttcccctggagctgaaggtttcccttccccgggagctgaaactggaaggctggaatctcggtgttctctttggcaatctgattgaaaatgccatagaggcctcggaaaagctgccatatgaaaaacgctccgtcaaggtgcattccagaattgcctcaggtaatctgcttatcagcgtcaggaacaactgggacggtaatttccatgcctcagctccaggcgggcagatatactcatccaagcgcagcggccccggcatcggacttgccagcgtccggaatcttgtgaatgaaaagggagggcagttctatctggctcccggagatcctgaatttgaagtttctattgttttatggagacagacaattgcttagacagcatgtgtattttgctttcagtgcggccggatcgtaacagttcagacagcatgaactgttacgccggacgactcccggccgcagctaaatctcatataattccggtcgccgatccttataggccggcagcttcgcccggaccttctctatacggtccgtgtcaatctcagcacaaatcaatgtctcaacttcaccggcgccggccacgacaacccccatcggatcaacaacaacgctctcacccatgccgttttctccaacctgatcacaggctgccatgtaaacggtattttcgattgcacgggcggaaatcagggtacggaactgggagcttttgagcggaccgggcacccaggcagtcggcataatgatgatatccgcgcccttggagcgctggtacctggccacctccgggaaacggacctcatagcatacaaagaggccaattttaccaaacggcgtatcaatcggttcgaagaacttgtcgcccggtttgttatcatcggattccttatagccgaacgcgtcgtagagatgtgtttttcggtaggtggatacaatctcccctttatcgtctatcaccacggtgcagttataattgcggtcatcttccggatcttcaaccttctcattcataccgaaaataatccagatgccgttatccgcggcaagctttctcatgcctgttacaaagggaccatccagcgtctgcgcagttcccaggcagactgcccggtcggtgccggtcggaaaatggctcataaagcactccggaaaaatcatcatatcaggctgataacgctccaccgcttcagccaccgctttttctgcgttagccaggttctcctccggccatcccttctggtcaagctgggccaaaacaaatttacttttcataattcttacctctcttatcggatagattgttacagttcagcctccggccaaactgctacaaataatgcatcgaaacggcaaaaaacgccgttgattgtggtgcaaagtttacttttcatcgcttcgcgccgccagactcagctaatctgcccgaggagcctcgggaggaacagcgtaatctgtggaatataagttacaagcaggagtgtaataatactggcaacaatatacggaataaccggctttacaatctccttaacctggatgcccgacactccgcaggcaacatagaggttacagccaaccggcggagtaaccattccgattgcaacattcataacaaggacgacgccgagtacgattggattgtagccaagcgtcagcgcaaccggcaggaagatcggcacaaagatgtacatgatggagttgccgtcaatgaagcaccccgcaatcagaataacgatatttacaactatcaggaagataacggtatggccgcctgaaatccggaccacaaagtctgtcagtgctcccgagataccggaaaccgacagtacccagctcataagcgccgcatttcccacagtccacatgaccgccccggtctgcttgccggaatccacaacgattgccagcaattctttcatcctcagtgtcctgtaaatgaacatgccgacgaagagcccgtaaacagcggcaacagcggcagcctcggtaggcgtgaagatccctccgtaaattccgcccaggataataaccggcatcataaggccccagaacgcatccttaaacgccgcccaccggtttgccgcgctggctttcggagcgcgcagcaatctgctctttctcgtaacccacatagacgctgcaaacagagaaaatcccatgaggagaccgggtacaataccggccatgaacaaagttcccaccgatacattggcaatgggactgtagacaacgaaggaaatagagggcggaatgatgattccaatccctccggcagtggccatcaaggcagacgcgtcacctttggaatatcccacggccgtcatcgccggaatgataattcctccgagagccgctaccgtggcgggcccggaaccggaaatcgcggcaaaaaagcatgccaccagtacacataccagagccagtcctccgttaacatgtcccacaaaggactgggcaaatgcaattagcttggtagaaattccggctttctccataatgtttccggctaaaatgaaaaatggtatcgctaggagcaggaatttgctgatggaagcataatagttaaacggaaccatcgaaagccccatcccggaagtgagcagcgccgaaacactggaaaggcacatggccgtcccaatcggcgcgccgataattacacagagggagaataccaaaagcatggttacagcagtcatttctcatcctcctctgactttttttgcaattgaacgataaactgaatgctgcggtacaggataaacgccaggccaatgggcacgaacgaaccgtatacccagtttggaatctttaaggcaatcgacaggctgccgattttcatctggctcttcaccataataattcctgtatacaataatacggaagccgcagcacaggtaagcagtgtatcaattattaaaaatactctcttcattttcggcttcatcatcccggttatcaaatccagcgtatagtggccgttctccttgctggccagcgcgcctcccattgtggaaaggaggacgaacatcgcgcagaccagctcctcggtaaaggaaaaggaaaagtggagtacatatctggaaataacaccaaggaacactaatataagcatggtaagcattacaaatgccacgattaccgcttcaaagctgattgtactttttttcatagagtccccttcattcattttttattctacgccccaggccgcgcatgcttccgggccgacgatctttttgtattcttcgatagtaggcgctgctccttccttgaatgccagcagctcttccgctgtcggaacgtaaaccttaacaccgtagtcgatcatttcctttttgacttccgcttccgtcttgctcatgtaatcgcggccccattttgcagcttcttctgcgcattcctggagaagcgcctgggtatccgggcttaatttgtcccacgccgcctgatttgccaggaaatcataaagcgaaagcgttgcattcacttcggtgatatacggctgcacctcgtgcagggaaccggaatacagagtctgatagccgttcatattaccgtccaccgctccggtctgcaatgcggagtacagctcggaccagctaagctgtgtcggatctgcgccgagggaacgcatcagagacatctggagatcgccgtaagtacgcattttcaagtttaccatgtcggccggcgtgtgaagctcgcgcttgttgtttgcaaactgcataatgccgttcgggaaggtactcaaatagacaacgccgtactttgaaaacagctccttactgaactcacctccggtggaatcggctttttcccatgcctgatcatagtttgcaaatgtaaaaggaatggaagtaacctggaaagtctgatccacatcggagaaggaattctcactgataatagcaagctcaaaggcgcctccggcgatcatcatctcgacgtggcgtaccatatcaccgccgctcagctgacaattcggaaaccggtcaatctgtacctggccgccgcttttttcttcaaccagacgctcaaattcgattgccgtaaggccgtccatcccggtatcaccggtcgcgtagctgagcttcagggaaactttatcataatttttcccgtctgcggcagccgcgttttcaccggttccctccgcctgcaaagcttttgtctccggcgccggggaactgcttccacatgcgcagagacatccaagcatagctgccgttaatgctatagaaagtatttttttcatacctgtttctccttttcctttttgtaaatatttatttctcaaggtaatttcttacacagtcttccatctcagccagcatcagctccacagccctttttcccttctcggccgtggcggactgcgcattgccgagagttccgctgtcggtcatgctgctgtacggaacgcttttcataattgcgggccatctgtcgtcgaacatcatcggtgtattcggcgctttggacatatcaaccagctccggaaataaatacatcagaacagaagtctgggcttcgcttgcatgggcgtgcggcgccggtgtctcccacatgccggtcttatcggatacggccggtagatactgccatacgccgacctgtgcgtatttaataccgttcttaattcttgcatcctctaaaacctcgttcagcggctgtgtgttgtgaaggtggttgttgacaataaagaagttcttaaagccaagacgcacaaactccgcaatgatttcgctgtatacagccttcagggtctccccggaaatcgcaatcgtacccggaaaggacgtgaggctcttggactgtcccacctcaaggcatgggccgacgataccgtctatacgctccgccagcatttcggacatcttcttcgcaaccagtatgtcggctcccagcgggttatgcgggccgtatacctcacaggccccgacggaaggataattgtttttgctgttttgcttctctgtgcgaactcactccatgacatgtctctcaatttgtactgcataatacttctcctttcagaaataaaaattttagatgactttcagcactttatgctttgcttttttataaagcaaactgcatgccaattctgaatctgacagattttttatcgattatgcatagttttttgtcgaaaaaatcagaaatatggaattaacattgtgtatattgcacatggctgtaccttttaccgtcaatgagccgctgctattagtctcatttttaagactatctgccggataaattctcatttttgagactatggaaggctaaaacgtgtgaacgagggatggaccgtttttatttgacaggagaaatttcctgttaaatgataacctgcccgctctgtgtacaggtcaccgccacaaaaaaacagtctgagcatctgtatttcagatgttcagaccattcctctatttccgttattcatgctgtgccgcgcttcctattttccggtaataagatgcgacgctgatctcaagatacttacaaatctcccgtacctgctccttcgtgggatgccctccatagcgggccgccatagttctgagaatctcctgctccttcatccgaaggctggtctttaacggcagacaggatgtttctccgccggtccggtggcagccgtttctagtctcattattgagactgagtattttttgaggcgcggcctccagcgacaggacaggacttttttcaaaggtcatcatatattcgatgctgttctcaagctccctcacattgccgggccaacggtacttcatcatcagttccatgaccggcgcggaggccgttcttatctccttttcgagaatcttattatactttgcgataaaatgctgaatcaaaaagggaatatcgtcggggcgttccctcagcggcggaagatggagcggaacgacattcagccggtaatataaatcttcccggaattccttccgctctatcatctcttccaggttccggttcgtcgcagcgataattctcacatcgacattgataagcgaactggaactgctcccaatgcggtccacttttctctcactcagtacacggagcagtttagcctggagatacagaggcatatcgccgatctcatccagaaaaaaggttccatggttggcaagctggatttttccaattcttccgccttttcttgctccggtaaacgctccctcctcatagccgaacagctcgctttccatcagggactcaggaattgccgcacagttcatcgcaacaaacgggtgcgccttcctgggactctccgagtgaatcaggcgcgcaaacatctcctttcctgttccgctttcccctgttatcagcacattggatgcatgctgtgccgctatcttagcctgattcaccagcgtccgcattttcttgcctgaaaatacgagtttctgcgcgaccccaagcccctcctgttcattctgcgtgatgctgttttgtatctgggagaatgggttgataatgcagaggacgcttccctcgctgtccctgataaaccgcgtctttacctggagcagatactggaagccgtcaatatttttatgtatttcccgtatcaggattggctgttcctctgttgtctgggccgccaccgtaacaacctccgccagcagggcgtcctttaaatcagggtcgctgaaatggaggtatttctgggcgtacatattgctttggcatatccctgccgtcggtgaatacaaaagaatcccgtcctccattgcctgtatgacggaatttaactggttattcataatctgcgtctgctcaatcagtatctcctgttccagcttgcttgagatcaaatcggaaatccgctctaagtaaaccattaactgctgctgtttttccacgataatcttgtgctgctcctcgtcaaaggaagcaatgacaattactccctccagctctccccgcattttaatcggataggccagtacggaataaaaacggctgtccacactttttctcatattgggaaaagcaaacacaaattccttcgtgtcaatcgcgaccaccggcttgcccgtctcaattaccttcatggtatagctgttctgccattgcgggatcaggcggccgttttcatagcagactatatccgaattataccattcccctgtggccgccactcgctccagcggctccgagcgcaggatggtcagttccaggtccagaactgctgaaaaagatgccagcagcgtgttcaaataatctttaatgtcactaagcttcatcggtatctccatctccgtttcttctgttaaatgattaaatggattatatcacatctgcggtaaatgttacagataccatgaacgctgcccgcattacgttctcaccataggttactgttcacaccatgccaaaaagcggcatgatgtaaacaataacacgcttcgcgatgcacagaaactgcataaaacgcagtttcgcgccgtgtaactcgggtttttcgcgcagaaaacgcacgaaaacacctcgcgggacataaccgtctgaacagtaaccaccatagcgccgaatatgattgaaatgtcttaaaattatagttataataatcacatcatacacttaaaggagaaggatatggattacaggacttatttaaagcattatcccgataaagacggccgattcggaccttacggcggagcttacctgaccgaggaactgcttccggcttttgaagaaatcgcagatgcctaccagactatctgccattcttcccagttcatcaatgaactgcgcagagtacgcaaggaatttcagggccggcccacgcccgtctaccactgtgaacgtctgtcgaaaaagattggaaactgccagatttacctgaagcgcgaagatttaaaccacaccggcgcgcataaattaaaccactgtatgggcgaaggccttcttgccaaatttatgggcaagaaacgtctaatcgcagaaaccggcgccggacagcacggtgttgcccttgcgacggccgccgctttcttcggtctggactgtgagattcacatgggcgaggtggatattgcaaagcaggcccccaacgtaaccagaatgaaaattcttggggcgaaggtcgttcccgttacccatggtcttaaaaccttaaaggaggccgtggattccgcgtttgaatcctatgctaaaaactacaaggattccatctactgcatcggttccgctttaggcccccatccatttcctctgatggtacgtgatttccaggccgttgtgggatatgaggcaagggaccagttcctggagatgacaggcatgttcccggatgaggtgtgcgcctgcgtgggcggaggcagcaactccatcggcatgttcattcccttcctggatgatcccgtggacatcacaggaatcgagcccttgggaagaggcgagactctgggcgaccatgccgcttccatgaaattcggtgaaaaaggcatcatgcacggctttgagagtattatgctgaaggatgtaaacggtgaaccggctccggtttattccattgccagcggtctggattacccgtctgtcggaccggaacatgctttcctgcatgatcttggccgtgttaaatatgagacggtgggggatgaggaggccatggcggccttcttcaagctgtccaggtatgagggaatcattccggccatcgaaagctcccacgcagtcgcttacgcgatgcgcagggcaaaagagaaaaaacttggctccatcctggtatgcttaagcggcaggggtgataaggatatcgattatgtggttgagcattacggatacggagaacagtttttagattaaggacacaaaaaggaaccgtacaccaatgattcgttggtgcatggttcctttagcaatttcagcaaaataaaataatgcaaaataattcttcaaattttttgaccttcaattctttccatatataaagattatagacgcaggccatccgttctcctacggcataaacatcataagcgcaggctttcccccaatttttccctttatcagtgcagcacaaaacaggaagaaaatatccttaacaaaatatcattgtcataatcggaaattttctttgttggattttgttctacagaatatgatacgatacaattacacaaaaaaaagagagaaaatccgtgtaaagtaaacatttttcacaaaaccagctagagagaggcggggatgaaattggacgacgtaattttaaaaaatggttttgtcatggacccggccaatcaggttcgggaacggacggacgtcgttatccacaaaggaaaaatcaagaagatcggcagggaggaaacagggtcggcgaagcaggttatcaatgctgcgggttgtatcattaccccgggctggattgaccatcacacccacctgtatccgcttatcccaaacggaattccggctgaatccgtatgtttttcttccggcgtcaccacagcggtggacgcagggagcaccggatgcggtacctatgagaaaaaccgccctgtgataaaaagctggcgcctgggaacaaaggcctacttaaatgtcagctccgccggcttgtccacgctgccaaatctggaaaacgtggatccgaaggactttgacgccccagaaatcaagcggttgttttcagaatacggagacgagctgctgggcctgaagcttcggaccagcaagtccatagtggggagcttagggtatgagccgctgcgccggaccgttgatttggccgacagcctgggggttccggtgatggttcactgtacggatccgccgggaacgatagatgagcttttgtccatcctgcggccgggagatattctcacccatatgtatcaaaacattggcgacacaattcttgccggcggcttagttaaggaagcggcatggcaggccagggaacggggcatcctgtttgaagcggccgacgcgcgggcgcatttctcttttgatgtgggcgaggaagccgtgaaggagggatttcttcctgacctgatcgggaccgatctgaccgcgttcagcatgtaccagcggcctacctcgtttaatctggccatgcaggtttcgaagtatacatacatgggcgtggatatatatgaggtcatcaggcgctgtacggagcttccggcaaaaattatgggaatgcagggggaaatcgggacgctggctcccggacgaaatgctgatgtgactgtggtcagacaggaaacccggtacaatgaattcggagaccggccgtattacgacgagagccggaacatccgaaaaggaaactttatttttcatccggtactaacactcaaaaatggtgaaattgtctaccgggacatgacattctaaagaagacattgtctgaaacaagaaagcattctggtgatatgtcaagaactttttgaagaagattttgatatgtttttcagaaaaaagggtaactttaacagaccttcggtatattttacgtataaccgaatgtcagttcgactcaatattatattcggtgtccagcttttcgccggtgtacagttggtttttgaccagcaatccaaaaacgagtcgtactaatttacgagatgtaagcgcgagtgctcttttgtgctgatgtttggttacctcagcatattttctggcatagaaatcagcatattcagggatgtgcttcctgacgctgtttgccgcttcgccaagatagcagcgaagatagggatttccggctttcgacattttgttgtcctcagaagtgaaatctccggaatcacccttaggccagtaaaggccggcatatttggcaagggcatcggatgaatggaacacggttatatcgcctatttctgatagaattccggatgcccatatcggacctattccaggtatggattgaaggatgagcagggcgttagggttcattccgttgatgcatttctcaatcgcctgctcgatcagcttgatttctttctgataggcgtggatgcagttaaacgagcttgccagtgatatgctcagtggttcatacatgcacttgtctaaccggtaggaatccctggctgccttgcgcaggagttccgaagtttttgataggtcagagatgcggttcctgctcttccccgcaaggaaggtaagcagatcctcttccggcatatcgataatctcctgcggagacaaaaattccgtcaggacagctgaggacgtggcaccatagagactgccaaaaggcttgtcatcaccttcaaggagctgaagttcactgaacttcagataaagattcgaaaccatataagtcttctccctggtgatgcactcagaaaggtgcatacggtgccttgtaaggcgtttcagggatatgaactgcccgccgcgccatggctccagttttttcgtgcggcctaccctgccgaagtccgcgatgagatatgcatccgtgggatcggtcttttccattccgatataggattttcggtaattcgaagcggcctttgggtttacacagaatacgtaaggcctgtagggcatgagaacctcgctggccgacaggaagtttgaaatatgcacgctgtatacagaagtagattccagcacgataagaaccgtatccaggtttttatgcttctgcatgcattcggcaatcatatttacaagctgatcggcgcctggctggttattgccaaacgacgatgagatgtatttgttttcctcaaagtccatggcatagacggcattggtctttgagcttacatcaatacctacaaacaaggtggacatatagttgagctttaacatgatatcacctccattccgatggggatttgtgaagcctgaagcaaaaggtttatcctgtgccgcatacggtgaccgaaccctcgcgcaatgagcatgcacccagtcagccttttttgctggggctaacggctggggatgaaaattctgtgtcagcggaatgtgccgtatgtgccaggctgaatgctttcaaagcagtctcggacgaagccggctgaaaggaggagaagcagtgccttcggacatcagactctacctgatatcataccacaggatctacctatattgaaatgtaactatcaactgtatagatgggaatcgggatgaggggagtacctcttagatatccttaccatttatacccaaaaaagaataagtctgtaagcggtttttcttgcttacaaacttattatacgaggaggagaagtaatgaaagcgaaaaaaggtttagcaattgcaatggcggcactgttatctctgacagccctggccggatgttccggcggagcaaaggaggctcccgctgatcagcagaaagcggctgataccgcggcaggagacacgaaggcggagcagcctgataatgcggcagccgacgcagacacaccctggccggagaaagcagtgactgtgacacttccctataacgcaggaggagacactgatacctattgccgtctgatgtgtcaaaagctggagaaaaaattcggacagcccttcgtagttgttaatatgaccggaggcagcggaattgtagccgccaaaacaatcatggccgagaagccggacggttacaacatcctgtttaaccacacaggcgcgtctctcgtccaggaagctacaaaaacagcggatttctcttatacggatgactttacaaacgtagctacggtggcacaggacaacacctacacgctggtgtgcaagacaagctccggatggaacaatcttgaagaaatgatagcctatgctaaagaacatccaggcgaagtcaggtactcccaggtttacggaagcgttacccactatgtctgtgcaatgattgaacagagcatgggaattgagctgaacaagctggacgtaggaaccggaacagcagaacgtttagcagcgttcatgggggatcaggtggatcttctggctgtcaattacatgaatatcaaggattatgttgagaacggcgactttattgtgctgggtgtctgctcggaagaacgctgcccgggtatggaagaattcccgactctgaaagaacagggatacgatatcgtttcttccaagaactatgaaatcaaacttcccaagggcgcggatcctgcaattgtaaacaaactctccgaggctattaaggaagtaaccgaggatcctgactttaaagaaactctggaaaaatattatgccgtgccatattaccgcgacgctgctcagatgaatgaggaagacaaggccgaggttgcaaggctgaccgaattctttgcagggcagtaaggggggaagaaaggagtacacaccaatgactaataaacagagggattacgcgtgttcggtgctgttcctgattttcggtatctttatgtttatccagtccctgtccatccattcgatgatggacaaggacgtggggtcaggttttgtccccaagatcgtggctatggctataatcgtaatctctgcgattaagctgctcctcaccttcttatctaaaaagtcagaggaggccaaaaagtcggacgaggacataatgggcggtttactgactatcgtcctattggctatctatgttgtactatttaagcctttgggatttattctctccacgttcatctatctttttttccagattactctgttgagtacggaaaagaaccgcaacttaattctgtttggcatcatctccgtagtagcgccggtagtgatttacgcactgtttgtgtatgtcattaaaatgccgctgcccacgggactgctcagcttttaggaaggaggaagaaaaatggtattagaggcctttactctcgtatttcaaccgatgtgcctgctgctcatactgataggcgtaatcgtcggtatcatattcggctcaatccccggcctgtcggcaacgatggcggtggttctgtttcttccgatgtccttcggaatgacgccaatgaacggaatctcacttctggttggtttatatctgggaggaatttcaggcggacttatctctgccatcctgctgaaaatccccggcaccccgtcttccatctccaccgtatttgacggcgggccaatggcagataagggagaagccggaaaagcgctgggagtcggcattctctactcttttatcggcggcatgatcagtatctttgctctgatgttcatatcccgtaccttgctgccgtaacgcttaaatttactcccgtggagtatttctccatcgctattttttcgctgactattattgccagcttatcgggaaattccttaataaacggccttatcgccggtctatttggaatcgccctctctatggtaggaatggctcctatcgatgcgctgacccgttttacctttggtcagtaccagcttctctccggctttgatattgtagtaatattgataggcgtgtttgcagttacggatatcattaaggcaggctttgaccggaaacacctggccgacaagatgagcaaaacatcctatgagctgaagggattcggcatcagcctgaaggagtttaaggaacagtttgtcaacatgatccgttccgctctcatcggaatcggaattggaatcctgcccggtatcggcggttccacatcaggacttttagcctacacggcggaaaaaaattcttccaagcacccggagaagttcggaaccggtattattgatggaataatcgcttctgaaacctccaacaatgctgtaatcggcggttccctgattccgctgctcaccatgggaattcccggaaacacagtgacggctatatttttgggcggactgaccatccatggtatttctccgggacccctgattttccagaagagcgggaaatttgtatacggtatcttcctggccctgatcgtggcaaacatatttatgctgatatttgagcgggccggcctgagaatttttgttaagctcctggatattcccaagcacctgctgctgcccatcatcatggtttgctgcgtggtcggagcgtattcaagcaactcccgtatctacgacgtgtggtgcgtcctgggattcggacttttgggaatcctgtttaagaaattaaaaatccctacaacgcctcttatcatcggcttcattctgggatctatggcggaagaaaatctgcggcgtgcgcttcaggcaagcgcgggcaactggtccgtgtttgtgaccaggccaatttcactggcgttcctgctgatagccgcattctccgtactgatgacgttcaggaagcagatgaaacaaaaggcagctccggttgaggaagaagaataaccggcaaacggcatcagaggatatctattttataaacaaaagcaggcatatggttcgactgagaatggtatgcctgttttttttatttaatgtctgctatcctaatctgtcaacttaaccgaaataaaataactcttcaaactttttatctaatgcaatacacaggagtaaggccagtttcgcagtaggattaaactggcctgtctcaatatagctgattgtctgtctcgatacgccgaccatggccgccagctctccctgggatatgccttgttcggctctggctgttttcagccggtttttcagtattaattcatgttccatcgttaaacccgtcaaaataatcccatcacatactgtaccagacagaacagagagctgattccccatgccacgccaaggaagagattacttttgtccttcaattctttccatacataaagattgtaaacgcaggccatcagtccccatacggcgtaaacgtcataataggactctcccgcacgcagctttacaatcgtgagaagtatgcacagggcaattcctgccgtcagtgaattcttacatcccgtcctttggacctgctgctccatctcatcgggtttattccccttttgattttgcactttgcgtaaaatttcatctttatccatattgttcacccctgaaattctgtccgcggaattgtcaagttttctttacatctttattatactgttaagaagggaaagctgtcaagttttctttgcatttagtttcactttttgaatccattctcctctttcttaactttttccactcaactctcaggctggaatcttgcccgcattaaaaaatacacagaggccatgaaatataatctggaacatttttctgaattgatggagcaggcagatgtactcgcggaaaataaggatgagcttctcaaagaaagtgatgatttacagttccgccttacatcagatataacaagatccccatcctctgaggaggtgcaggaaatcgtccgtgagatttacgataaaaaattcggcaaaggcgcttcagagtttacagcatgctggttttggcatggtgtgaacagtaatgccgcctgattttacgccgcgtatggtacaccatacttgattgactctgtccgttttccatactataataccaggtaagaagcccgcagagcaaaagaaaaagttgcccttagcccgcagagcaaaggtaacggaaagggtgcattgtatggactcatataagtttgattattccggcgggaaacaattcatgctgaatttatgcaattgtcctcccaacaatcagggccagtttaccgcatattccaatatcatcatccactatccgggatacaagaaaaatggagattaccgtttggaaattcagggagggaccgttccctctcactccgatatatgcaaaattctgcataatttgattgtcaataaccggtactccttctctgtcctggaacagcttttagaggatatttacgagaacggaaccctcaccgattatgaagaccgtaaccttaaatatttacaaaatctcatattctgggttacgcttcaggaagagataaactatccgcgcactaaaccatggtttgccggaagaaatcttgctttttgccggttttatgaagcgatttactgcaccaggccggaatccgccttcactatcagggatgtactggggcgttgtaataatcacggaaagggacggccagttctgtaccggctggcggattgctcgcggatttattattattgatgggtatttatatgccgtttgtattgagtataattatcattggtaatattagttagccgcataattagttatataaaaaaatcgctgaagtctcacaacctcagcgatttttctattgggggagtttttttatagtccctttcttattttgataacagatattctgaatcagtctgctttgcacctttccaattattgtaaatcggaacagccagcgatacaatggagataacgattaaggcaatacaaattggcctggtcacaattgacataaccgctgctcccagagaaccttccattattattgtgcgaaccatgccacgttctgcaataggtcctaaaatatatcccaaaacaactgaagacaaatcaattttcatatattttaacgcatacccaagtaccccgcagcccagcatgataaatacatctgcataagaattgttacaggaaaaagcgcctaaaaccgtcaaaaccaatatgccgctggcgagaaaattctgtggtatacggttaacctttgcaaattgtttcgcgccaagcacacctacaataaccataacaaaggcggccaccagcaatccaaaaataaaaggatatgttacattcgccttaactgtaaataaatcgtttcccggagtcaggccgtgcagcatcaaggctcccataaggattgccgtgacggcatttcccggaatccctaaagtcatcatcggtatcaaggcgcctcctattacgccgttattagccgattcaggtcctgatataccttcccggtatccagtaccgaatttttccggatgctttgacaaatgtttcgcctgatcgtaacccataaaagcggcgatactccctccggcgccgggtataatcccgatgatgactccgacaataccgcaccataagtaggtcaacggataacagcatatgtctcttagcctgaatttgtatttattaattgaggataatgcattatccatgttgacggttgcatctttatttcctatcattcccaaaagctgggaaatcgaatacaatccaatcagagtaggcaccgtaggaaaaccggtattagtaccgcaatccccattgtagccgacagaccgggcatcgccccaaagcaaataccaagtatggtccccccccccaggacagcaatcagattagccggagaaagagccgtcgtaaaccccataattatattcgataacatattgttctcctctctttataaattgaaacatatcaaaacagtatgccgccgggtaacggaactctcaaaaaaaccttaaatgcaaagaaaataacaactgccatgactgctgagacagccaaatactgatactttttattttctttggattgccagtaagagaaagctgacacaaagataaatgttgtattataaaaaccggcccccaatgttagcttttgtatctaacattgggggccggttcattccattaactatatttgtttagtttatatgcaaatacacgcccttttttacttcaattacatcatttattctggcttactggttttctgttgccaatatgttgccagaaaccttgttacatttcaaataaatcagaatggcttcctgtgtcaactaaagtcaaagttagaatatcatgttcaattaaataaattaaaagccaatctggttggatatgacattccctaaatcctgtgtgccttccttttagttcatgatccctgtgcttatcatccaatgaaagtccatgaattaatttgtctactacggtatccagtaattctatatctaatcctcgtttcttcgctcgttttaagccctttttaaacttaccagtcagtactaattgataggtcataattccatatcctttaaagcttcagaaaaactattatatttcttagtgtcaggatctcggctgattttcttagcttcttccatcgcctctataacttctggtttatatttgggaagttctacattaaaaggcaaaccacctcttaatacacattgccttaaaaacatattcgtagcactcgatatatctattcctaattgtccaaataactccattgcttgtttttttaactcttcatcgatcctaatttgtgttggtactgttgccataatcatcaccttcctttagtatcattgtatcgttttcggtttacattgtcaatcgtttgtattattttgataaatataatgtttattatattattggcaacaaaaaatgctcctattattgcgatttgtatataatacaagaaatggcagatactcaaaataaatacctgccattcagaataatattatcaaaaataattttactcaaactcaatcgtagccggcggcttcggagacatatcatagcaaacccggttcacattctccacctcggccagaatccggtctgttattacctggagtacatcccagtctacgcgctcaatcgtcgcgctcatggcgtcgattgtattaatcgcgcggataataaccatatattcaaagcttctcgcattatgcttcacgccaaccgatttaaaatcgggcacaacggtaaaatactgccatacctttttatcaagtccggccttctcaaattcctccctgagaatggcatccgattccctgactgcttccaggcggtcacgtgtaattgcgcccagacagcgaacgccgagtcccggtcccgggaaaggctgacggtaaaccatggaagccggaagtcccaattccaatccgcaggcacgtacttcgtctttaaataactgcttcagaggctcgacaagctcaaacttcagatcttctggaagtccgcccacattgtgatgggattttaccatctttgcagtcttagttccgctctcgatgatgtcgggataaatcgtaccctgtccaaggaaatcaatgccctccagctttcttgcttcctcctcgaacacacggataaattctcccccgataatcttcctcttctgttccggatccgacacattctcaagtttccccaggaaacgttctgccgcatccacatagatgagattggcatggagctggttgcggaagacttcaatcacgctctccgactcgttctttctcatcagtccgtgatttacatgaacgcatacgagctgctgcccgatggccttgataagaagggcggcaacaacggaggaatctacgccgccggaaagagcaagcaggactttcctgtctccaacctggctgcgaatcagctctgcctgatcctcgataaagttcttcatattccaattggggcagctttacatgtgtcaaacacaaacttctttaagacctcatttgacggaagctctgttaactgctgttcacatttcgcagacggatgatcgattgccatcatcggataaccgcaattataaagttcactgcttacatctacagccgttccgtccaccacacggttttcaccgccgttcagaataatcccttttacattctgtaaggccttcagttcctccaccgttatatcatgtggatgaatctcgctgtaaactcccatgtcgcgtatctggcgggcaattacggtattctccgtgctgcccaaatccagaattacaatcatatcctgtttcatggtctttctcctttgtcatatataatatttttcattgataacatcttatcggctcagtgcggcaaagaattccggttccggtatctttatctcatatccatattcacgcagcacaagctcctcgtcaatcctctcctcaaagattccgccggctcttttaaacccgtttttaaggtaaagattgatcgccggcttattaatgtccacaacaaaaagcctcagatatccggcgccctgttctccggcaagttccatggctctcttcaatatgtaactgccgagacctcttctcaaataatcggtattcactcccagacggtctatatagaacgcttttgcatctttattctcccatctcacataagcctcaccatcattcgcatcacataaagcgaaagcaccggctacgtcctcatgctccgtcagaacgtataagcggttcctcttgatatcggtgacgaaacactcacatggatatatttcatcccaaatctgtacattgtcccgatccatattctcaattattttccggtatactgctttgattttcggtaaatcgctcatatcagccagtctcagattcatagaaactcccatgccgtccgttttccgcatcttttattgtttcagcccacgctcgatgtattatcgaagtgcggctgcttcctatacggacacgtggttggcctcatggcagtgggggataccgatttctctccgcccaccactgccgttaaatttgtttcgggcaattcatctcaccacattcgaggatgggagaatccttgcaaatatttgttgaatggaatgcttgatttttattataactgataatttccgaataataaacttctttccttagatttcatggaattttaataacagcttgttacggttcagacaaatatcctcaatcaggctctccgaccgccttgtccagaaaaatttcaccgtccaggtgctccagctcatgacaataacattttgccatttccccttctccggtcaggatgacttcctgcccgtactcatccagggcctgtaccgtcaccttctgcggccgaatggtattcacaaattttccggggaaactcaggcagccctctatacactcctgtgttccgctccttccgataattttcggattcaccagctttaacagttcgccgcaatattcgattaccacaagccgcttcaggattcctacctgatttgccgccagcgcagccccgttctccgtatgacgcagggtatcaagcatatcgtccagcatgaccctgattttatcgtctacttccttcacttctttacaccttttgcgtaatatctcatcatcattatatcgcatttgtctgattgccacgattctcccccctgctcctgtctgctcttgattttttctgactttcagcaaataaaaacacctcttcaattgaacagccgaatatctgtgaaatgtcataagccagccagatcgacggctcaaatttttctgtctcaattgcattgattgcctgtctggaagcgccgaccattttaccaagctgctcctgcgtcaggcccttttgctcccgcaattcccttatcctgtttttcatttacagcctcctcctttaccatgcagttatcatacatttcttaacaactgctgactggtacatcgtatcgcagatttcggcgcatacagcggatgacaatcagagctcccatgcacaggaaccggcaatacgctataaatagtataagtttcacttcgtgtaatgtcaaccttactgttcacacggttgcgttacgcgaggtgttttcgtgcgcattttgcacgaaaatcccgagttttacggcgcgaacggcgcttttttccgtttctgtgcaacgcgaagcgtgttattgttcgcagcacgccgctttttggcggggtgtgaacagtaacaccttacttttttaatcagcagatttttttattaaagacttgcaattttctgccgtatgtattatattaaagcaaaggcagaaagaacatgtgttctattttgaatagggggagtattatgataatcagcgccagcagacgaacagatatccctgcatttttctccgactggttcatgaaccgcatccgggagcaatatgccctggtaagaaatccgttcaattcgcatcaggtcagtaaaatcagcttaaatccggacgttgtagactgtatcgtattttggagcaaaaatccggacccaatgctcaccagactaaatgaattacaaaattacaccttttacttccaatatacgctgaacgcttatggaagagagattgagaagaaccttcccgccctcaaacagcgcatcgcaaccttccagtcgttatcaaagatgattggaaaagagcggatcatctggcggtatgatcccatcattctcaatgaaacctatacagccggctggcacagcagcgccttctcgaatctggcctgtcagctcagcggctataccggaaaatgcacgatcagctttattgacatgtatcccacaataactaataacgtccggccgctggggatccgggaaatacccggcggcagtatctccgccctggccagaaatctgtcttccattgccgcatcctgcggccttgcaatagatacttgtgcggaaaaaattgatttgtccgattgcaatatccggcacggctgctgtatcgacggcgaactgatcgcaaagcttgccggctgcccggtcaacacacaaaaggataagaaccagcgtcccgagtgccggtgtgccgctagcatagacctcggattttacaatacctgccgcaatggctgtctctattgttatgccaatcacagccgacggcagatggaggaacgatgccggtcctatgacagcacttctcctctgctctgcagccaactctcagaagatgaccggatctatgaacgcaaaaccggaagtcttaaaaatatacagtatgatttatttagcatacctgcgccctgaccggctttcccacagttcactgccgtggtcatagtgaatacagtacgccagcatgctctgcgttgtaccggaaaataacacgtaaaaaagaaccatcctgccatttcataaaagcagtttggttctttcctgccagatattatcaagatatctcttacatcagaccaccattcttacttcagtccatttttccgcttcggaccattatttcttatccagtccggaaacatcgtttaacaaaattccacaataagtctgctccgcttcgcgtacatgctcataaagcagatcaggcacacgatcgaactcttcgttcagcaaagcatcgattatctcaatatgaccgttcgccccgctgatggaacgctgctttaaataaaattcctgggtgcggattctctgaaactggtcggacacataggataacagcttatttacatggcgtttgctgcaggcctcgtagagatatttatgaaaatcataatccagggtacgcagcatatcgtaatcctgattttgaagcgcctgctcaattctgcttcggaaatctaaaagtatctctttattataacagtgcaaatacggcttaagaagcaacggctccatcactttccgaatttgaatcagttcaatgatagtctgaagcgacaaatccgagactataatccccctctgcggcagagacataaccagcccctcccattccagcttgacaagcgcttcgcgaaccggtgtccggctgactttcaggtcctcgcatatttttttttcatccagataagcgttaggtaaaatttcattatttatgatcttgtatttcaggtcctggtaaacctgatttgttaaattatcttttttagacatggcaatcagctcctgaaaatcattatatcatgttcactgcgttcacatgagtctccgacggaaaatagcgccagttttctgcggtgaacgcagaaactgtattgcgcagatataaagcccgctctgccgacattatatcataggctgcacttaaagaacagatactatttcatttttaggcttaaccggatgcttgctggtactgttcacacctcgctgaacacaaccgtgtaaacagtaacgcttgctgcctgatttaaaaaatataataaaaaacacttgaaatccgttttttcttgtcgtatactgttcgtatactaatttgtatacaaatataaatacacaatgtatacaaacttgaatagtaactgtcttaccacaaacgaaaggagaaaagtaaattgccgaaacacctgtattccctggtgcatctcaccaatatcaactgtccgccgccacaattcatctatacggcggcaaaagccggctatgatgcggtgagcctgcgaacaattcccctgggactgccgggagagtccccctataacctggcccaaaacccgcagttgatgcgggagacccggcaggctttgtcggaaaccggcatccggtacactgatacggaaattgcccgtatcgcggataacatcgatgtcaaagaccacgagcctgcaatggcggccgccgctgaaatgggtgtcacacacgtcctcaccaatatctggattcaggacaaagaatgctatacggaacaatttatcaggctttgcgagctggctgcgcaatatggacaggatgtgaatgttgagttcgtcacctgggccagcgtgtccaacctcagacagacaaaggaattgctgctggcctccggccggaagaatgtaggaattgtcgtcgatactctgcatttttaccgttcccgcgtaccactgagcgaactggaggactgtcccaaagaatggttccattatgcgcatctttgcgattgcggggcggaaataccgacggaggtggaggcgctggtccataccggacgggcggagcgtctttaccccggcgaaggagccgtaccaattcaagatattatttcccacattccaaaccaggatatcatatacggtctggaagtccccacgcaggccgcctgagcgagcttggatttgaggaatatgcccgccgggtattgaaagcggcaaaagcctgcatgtcggaagattagaaattaaacaaaaagaacggagagacagaatatggaacgttacactgacaaaatagttatgattaccggcgccggtgatgttgctctggccatagcagagcgcatgctgggcgaaggagccaggattgctttcacagatttttccgaaacggctctgactgccgcggtgaatgagatgacagcctccggcttcggagaggacagagtgatgaccgtacaatgcgacgtgcgcagccaggatgcctgtgacgctgctgttaccgcaattacagccagatggggcaggattgacacaatggttgccactgccggcattatccggcatctgcctatcgaccagatgagtgaaaaagactggcaggacgtcattgacatcaatctgagcggtgttttccgcgcctgcaaggcagtcgttcccggtatgaaagaaaaacggtacggccgtattgtcatcatttcctccatcggcggccgcaccggccgcaatgtgggcgtaaattatgctgcaagcaaggccggagtcaatggaattgccatgaatctgggctattgcctggccccatggaatattacggtaaacacggtcgctcccggccctctgaaaggacggatgttttcctccatgccccaggaacagcaggacagcctggctgccgggattccgctgggacatgtgggcgagctgagtgatgtcgcagccgcggctgcctatctgggcagcgacgacgccgcatggaccaccggcgaagtattggacgttaacggaggactgcagtattaattggaactacataattgaaaccgattaatcaaatttagataaaaaatatacatttgatttttgtttgcgcagcaaacttatatttaagataagaaaggaaaaagataaccatgaaaaaaataattgcaatgatcatgaccggcgccatagccctctcactgactgcctgcagcaattcgtccggctccgccccgtccccttcttccaacggaacatcctccggcaacacggccggcgcttccactgataaagctgcctccgatattgacacctccgaatacgggaatctggatcccgtcgaacttgtcctggcagactctgccgcaaaaggcgccgccggctccacctttgatgagctggtagcgataaaggtttctgaaatcacaggcggccagctgacaatagacacccacctgaacggggagcttggaaatgataccgatcttctccgccagatgcagaacggcgatattgatattgtcggctgtcagatcgctcccatggtatcttttatcccggagctggccatattcgaccttcctatggtctttgcaaaacacgacggagataaaattgacgcagtgttaaatggtgattccaaaacccgagccacactcgataccgcttatgagacagcgggcatgcatctgctgggtgttctgcaaaacgccacctaccgtctgactacggcaaatgtgaacctggaaacactgggcgatttcaaagcgctgcagatccgcaccatggaaaacagcaaccatatggcattctggacggccatcggagccgagccgacgcctcttgcatgggctgaggtttattttgctctccaaagcggaaccattgacgcacaggaaaatgcagccgatacaattgtgggcgccaatttaagtgaagtccagagctgccttgcatgcaccaaccacattctgtatgcgaaccagatctgcatcaacaaagcctcctgggatgccttagatccggcttaccagtctgcccttgagcaggctgtcacagaagcaatggaggaaatgcgcacccagttatccgatattgaccgtgaaaacaagaaaattctggaagacggggtatgacgattattaactatgacgattccttctttgacgagattctggcgctggacggagtccggaccttatacgaccagatcgaccaaaacaccaacggcctggcacagattctccaggatgaattgacccagtaaacggtgagccggaaagcagcagactttccggctcttccgcccgccttaggcaataacaggctccgggaagcggcgttgacaaagcaccggccgggacttatgataataataaaacaaaaccggggagccgcctatgattacgagagaagacagacagccgtttcatgatacctgtcgtattttagataaagccgatgattttatctatgttctgccccatcccgggctgctggaatggatatcaaattatactattacatttccaaacggtaagatcatatctgatgactacaccgtaatgccgcatggcagtgcaacattggtatttacatttgacgggaacaatttatgcagcaatttattcggtcccattacaaagccctgtatgatcggcaggcaggcaaaccaaaacgatatgctgtttattattgaatttcaaccagccggtttgcatgcatatacaggcgttgatcaaagagagctgtctgatcagaccctccccttttcattcataaatcccgtgttaaacaagaagataatggaaacgctggattctgtacacagtatgcatgaactggttatccatatcgaccatatactcctctcctgcctgcccctaacccatcccggtgaactgcatttgtctgtggagagtattataaaaaacagcggaaacatctctgtaaaagagttatcggaggctgtttattacagcgaacgtcatctgaaccggattttcagccgttatttgggaatgaatactaaaaccttttccagactggtccggataaacaaagcagtccggcttctccagaatcccggaaccagcatctcctccgtctgctattcggccggtttttatgatttgtctcactttattcatgatttcaaagacgtcaccggaattactcctttggattatcggcataagatgtccgatttttacagtgagattgccaaattctgatgtacaatggaggaaatcaaaacagaaggagtgtggcatatgaaatactgcggtacattaatctccgtatccgatatgacgagagccaggaatttttacgaacaggtaatggaacaaaaggtaatgttagatttgggtgtccacgtttcatttgaaaacgccttttcgctccagtccaattatgaagagctggtcggcgtgaaactggaagcacaacagaaacccaataattttcaactctattttgaggtggatgatttagagcggtgggaagcaaagctgaagtccacggaggggatcgagtttattcacgaaatcaaagaatacccatggggacagcgtgttttccgcttctatgactatgataagtttattgtggaggttgcggaaagcatgaaaagcgttgcaatgcgttacctggcccaggggctttccgtggaagaaacagcaaaatgtacgatgctgccgattgaggttgtaaaacagtttcaatcataatttataattggctcacagcatacaaaacagtgtgcaggaacaaatcacagaaaaccgtccggcagctccgtctggctttctgtgatttgtttcattccttatttggatgtattttcgaaatcaatcaactcccgtatgtccgttatttccaatgcctcagcgattttggacaagtgttcaaagtttatgaccgtccgggccccacgcacaatatcgctgatggtggactcgcgtattcctgatacctccgccagctttttttgcgttattttacgttcctccaatatttcctttactttaagttttacctgataactcatatgtctcactcccgtctctttgccaattcaactttcatatatgccaaatcccagatatttgtatcttttcccaccgcattgggattgtctccaatggatgaggcaaaattcattatactgcttgtcagctcttttttacagtcattccagatatcctccggtctgatgccgtttctccactcgtatttatcggtctcctcattatactgcaaataagagcggaatgcagcaactacaggatacataaaaccgtcaggaattttatatttcaaatcatgcatcccgaatttgctttttcccaccgtagaatcatccttgtggcctgagtatttttttcttccataccgtccccctgccgaattatatgcgtcggcaaattccatttcaatctgatcatataaatcgaaaatatccggcatcacattgacgaatttacggtaaaactccggatcctgcaaatacaattcgagcatttttgcttttgacgaataagcctgcatcggatgcgtctgcgcatcatatttctcaatattaaacatatttatgattgccacaacttccctcgcatctatcatcttcaggtttttccctgtctcatcaacggatacctgattctgcttaaatgctatcctgtcaaagaaaggcatgccttccagtccctctttaatcgggtcaaacttccgtgccagttccgccatggatttctcatccacctgcaccgaggtgttcctcgcttctgcaagattttcgataatcccttccacaccggtcatcacctcaaactgcacatactggtttaactttttcccctgatattcacagatgattctgtatgtatggccgccgtctatgttgccgtggcataatgtattgtcaaagtaaaccgtcacttctgctctctccggatcgtattccagtttggatgccgacaggatgattccacgattcttgagataaaaattgccgtcattgctcaggagagattccgtgattgccttcgcaacactggatgtcagtttctggttcctggggtttgtcgccatcggtatccccagaggcacatcatctactttcacatagaagatgtatttcttcgaatcattgttcccgacagggtttaaaagtacctgaaatgagtttgccttgaccggcattgttttctttagcatagagcctccttctctgcaccggatggaccggcagagttttatttatatgtttcctatacgtatttcgttatttcataataacgcaatatcgttattttgtcaattaatttctccactataatcagaaaataataaaatgcttgacattaactcccgccactactataatccaaattgcaagggagttctcgtaagagggctgagaggagggtgtattccctcgacctcacctgatttggataatgccaacgtagggatgcaacgacaatctacatttttacgactttcagaaaatctgtcggcagtgtgccgcgggttttaacggaaaccggtggatgtaaccgcaaagtcagagccattctcttgcaggaggatggcttttttatttaacaggaaaattcccctgttaaataaaaaccgctccgcggaggatcgcactgcggcggtagggcattatgtcgccgaagcgccccgccgcaggcggagaatcccacgagcgggattctttcttgtttaacaggaaaatttccctgttaaataaaaaccgctccgcggaggatcgcactgcggcgataaggaattatgtcgccgaagcgcccgccgcaggcggagaatcccacgagcgggattctttcttgtttaacaggaaaattcccctgttaaataaaaaccgctccgcggcactactcgcggggttcgtacttgtcgttaaaatctcctttgtaaacaaggaaaagaaggaggaataatcaatgaatcaacaatcacaatctttatccccggcgcgcagcagaaagtgtgctgtctacaggatggtgcttgcggcgatgttcgcctgtctcgcctttgtgctgaataccttcgtgtattttcctgccatggccccgttccagcacttcgttgatgtgattgccgccgtgacactgggcccctggtacgcctgtgccgctgcatttatctgcggaatactccggatgctctccggccgtacggttcaggctgtcaccggggccgtctttggtcccattctgggcggactgctctaccggagattccacagtctttgggccgctgccctgggtgaagtgatcggcaccggattcttcggcgccatcgcatcctacccgctgatgaagtggttctacggactggatgccgggtcaccttattattacataccgttttataccccatctgccgtcatgggtgcagccatgggcgtcgcagtacttctgattctgcgccgtgccggagtattcagccggatgctgcaggaactgaaccaatagcagaaaccgaaccaatagcagacactgaactaataaaaggagaatataatggaaaagtttgaagcggcgctgcgccgggtccgggagcggacccctctggtacagtgcatcaccaattttgtcactgtgaacgactgtgccaacatcctgctggcctccggagcttcccctaccatggcccacgacatccgtgaagcagcagaagcagtcaccggggccgacgctctggtatgcaacatgggagcgattgaagacacggatgccatgatactggccggaaaacaggccaatcggcttggtaaacccgttatcttagatccggtagccgccggagggactgcgcttcgccgggaatccgccggacggcttctctccgaaatccatttcgccgtcatccgcggaaatgcctcggagattcgcggccttgccggagaaacggcagccggcagcggcgtggatgcaggtgtcttagatgtcgttaccgaagaaaatcttctgtcgtctctggaaatggttcgttccttttcgcagcgcacaggctccgtaattgccgtttcgggagccatcgatatcatttccgacgggaataacgccatggcactgcggggcggctgcgccaccatggcgcgtatcacgggcagcggctgtatgctgaccactctgatcggcgcattctgcggggcaatgccggacgatctttataccgccgcctgcgccgccatggccgccatgaatgtgtgcggcgagctggcggaaaaacgccgtctcaccaatggtacgggcaatgccacgttccgcaccgatctcatcgacgcagtatttaatctcactgaacaacaattaacggagggtgtacgctatgaaatttactaaagaagaaatccacaaatccatgctgctctatgccgtcacggaccgcatgtggctcaatgagggagaaaccctgatctctgtggcggaggaagttttaaaaagcggggcaacctttctgcaaatccgtgaaaaggatctgaatgaggacgattttgaagcagaggcagaggcgctgcacaccctctgtgcgaaataccgcattccttttgtcgtcaacgacagcgttgaaattgccctccgatgtaacgccgacggtgtccatgtggggcagtccgatatcaaaggacgcgatatccgggcgctgattggtcccgatgctattctgggcatctccgccggaacagtgcaggaggctgaagcggcagaagcggccggggccgactatatcggagtaggtgcggttttcaccaccgggacaaaaaaagacgcacgctctctgaccatggaacagcttcgcgccatccgtaatgcagtctccattcccatcgtggcaatcggcggaatcaattccggaaacatcatgcggctggctggcagcggcgtggacggagttgccgtagtttccgccatcttcgccgcaccgcatcccggggaagcgacggccgggatgcttaagctggcagaagaaatgctctccgctaagacagtcagaggagaaggtaatgaataaacgcttcgctatttttgatatggacggcactcttgttgattccatgggattctggcagcggctcgggagggagtttcttgcctcacaaaacattacagagcgggtagatgaggttctggaacgaattattcccatgaccatgatagaatccgcagccttattcattcaggaatttggtctgtcgcgaacacaggaagacctggccgcagagatgaatgccatcatggaacgccactatcgttctgatattccgcttaaacccggtgttccggaatatctgaatatgctccggagtaacggagtgaaaatgtgcgtcgcctctgccactccggttcatctgatacgcgcctgtctgacacgccttggcgtggcggagtatttcagcttcctgatttcctgtgatgaagccggcgccggaaaagacaggcccggggtctacctcctcgcctcagaaaaattagaggccgcccctcaggaaaccgctgtctatgaagacgccctctacgccgctaaaacagctaaaaaggccggattttatacaataggtgtctatgacaaatgtgccgttgaaaactgggaggcattgaaagccctttcagatgaaacaatccgggactggaaagagcctgttaatcaatataacaacaaataaggagggaaaaataatgagtgcaagcattgcaattcaggtactgcccaaggcagaaaacgacaccgaactggtaaggatcgtggatgaggtcatcgcctatatcaaaagctgcggtctgcgctgtgaagtaggcccctttgaaaccacaatcgagggtgacagctacgaccagctcatggatattgtaaaggaatgccagcatgtatccgtccgtgccggtgcagaaaaagtgtccgcctatataaaggtggtatatcagccggagggccaaatcctgaccatcgaccagaaaatcaccaaacaccgttaacatggagccggttaaactacggcttaaaagcacatataagcatgatgaagaaagggaatctttatgaaaacagccttgacgatagccggaagtgattccagcggaggcgccggtattcaggccgatatcaagaccatgacggccaacggcatctatgccatgagcgccatcacagctctgaccgcccagaacaccaccggtgtcaccggtatctttgatgtaactcctgcatttttagccgcccagctcgacgccgtatttaccgacatacgcccggatgcggtaaaaatcggcatggtttcttccgcagagcttatcgaggttattgcagaaaaactgacacagtatggggccggtcacatagtggtcgatccggtgatgatgtccacttccggttccaaactcctcaaggacaacgcgatcgatgttctgaaggcaaaactgcttcccctggctgagatcgtgacgccgaatatcccggagaccgaactgctatcagacactgcaatccgcgatgacaaggatatggaaaaagccgcgcagataatcagcgggcggtacggctgcaccgtactctgcaaaggcggccacaatttaaacgacgccaacgacctgctgtatatgaacggtgaaaaacactggttttatggacgcagaatcgataatcccaacacccatggaaccggatgcaccctttccagcgctattgcttccaatctggcaaaaggaatggaactgactgcggcggtggaacgggcaaaagaatatatctccggcgctttggcagatatgctggatttgggcaggggacagggacctatgaaccatctgtttgaattaaaaggggaatttgtagtgtagattttaatattttggcgtagaagttatgttactgtccacagaactgcgcttttcagctgggctgtgaacagtaacgatttcatcacacttgcaacagactttgccatactttaaagagccttagtgactttaaaaattttttgtggtatagtaaacttccacttttatgaaaaggagttgataatatatgccacagatgaacaaaggcggtaaatttatttttggaaagtcactgatacgagaggacttaacgatacatcttccactgcaggcactcactgaatacaacgccacagcagagggaaaagtctatctttttaccggaagcaaaattaccggcggtttctgcgtgacaaggaagagtttgttagaaccatcaaaattgggacacattctttctgctaatccggctttactgaattaccagacttcggagggcgagtttatcaaatacaaaggacggtcatattgctgggtaagtatttccagaactggtataattcagttaaatcagaatataattgattttcttaatctggaaattggaatggagctgttatctatccgaagcagcgatattgctttcacaatgggtgccaaaggaccgctattagaaaaggcagaaaactatgatggagaaatcaaaatatattaaaaacaggtatcacgtaacatccggtattactcaaataaatgtaaaggtgcaattgaagaatcaccttttgtccagattaaaatagacttttttatttcacttttttaaacgtttcgatgtggaaatatgttgtttttggtttgtttctctccttaatctatccttatcccccctagagtgatcgactaaactaaaagacagatacaaaaacagagccggcaggatcttaattcctgtcggctctgcgaacttcttattttattctattttcggccggataacagatacgaaaccggagactagagatacctctactcgaattctatcgtagccggcggcttcccggtacaatcatacagtaccctgttgacccccttcacttcgttcacaatcctgctcgtcaccttgcccagaacctcccagggaagctcagccgattcggcagtcatgaaatccgatgttaaaactgccctgagggcaatcgcgtaatcataggttctctcgtcacccatgcagccaacagagcgcatattggtgatcgccgcaaaatactggcccaaatcgcctgcgatgcctgccttatcgatttcctcacggtaaatcgcgtcagcgtcctgaacaattctcaccttttccggtgttacatcaccgataattctcacaccgagtccgggtcccgggaacggctgacggaacacaagtctctccggaatccccagttccagccccgcctttcttacctcatccttgaacagcatgcggagcggttcaatgatctctttaaaatcaacatgctccgggaggcctcccacattgtgatgggacttgattaccgccgatttgccgaggccggattcgatgacatccgggtaaattgtccctggaccagaaaatccaccttaccgatttttttcgcctcttcctcgaacacgcggataaattcttctcctataattttacgtttctgttccggatccgataccccggccagcttctcatagaaacgctcctgggcattcacacgcacgaagtttaactcgtactgtccttccggtccgaatatcgcctcaacctcatctccctcattcttacggagcaggccgtgatcgacaaatacgcaggttaactgtttgccaatcgctttagccatcattacggcagccacggaggagtccacgccgcccgacagtgcgcagagcgcacggccgcttccgaccttctcacggatttcaccgatcgttctctctacgaacgcatccatcttccattcgcccaaacatttgcagacattatatacaaagttagaaagcatcttcgtgccttcctgtgtatgcataacctcgggatggaactggacggcgtaccagttattttcctcacactccatggccgcaaccgggcagacaggagttgtgccggtaatcttgaatccttccggcgctttttcaatataatccgtatggctcatccagcagatcgtctttggtgatacgccctcaaacagcttggaatccgtatctacttccacctctgtcttaccgtactcgctgacaggagccgttgccaccttgccccgagcagatgcgccgtgagctgcgcgccatagcagattcccaaaatcggaatacccagttcaaaaatttcctttggacagctggcagagtcttccccgtacacactgttcggtccgccggtaaaaatgattcctttcgggttcatttccttaatctgttccagcggcatattgtatgaatgtacttcacaatacacgttgcattctctgactcttctggcaataagctggttatactggccgccaaagtccaatacaataatcatctctttttccacgagtattcctcctaataatttccgttggtaaatttaaataatgttagtgaatctaaacaatgacctcaaattcataatcatacagcagtgtcctgccgtaactattatcggcaaaattgccataaattataaactcaggccacttctctacaaaaccggtcaaacacctgccataacggcagttacatttcccgcctttaagcgtactctttattataaaataatgacgatatattgacaagaagttttttcacggttttacgccatttttcgccctatattttgtatctttgcaacagtatggaaaaaatgtcaaacagcctcatgccggcctccgataccttaaagggcagagacaagcctgtttctgttcacaacctgccaaaacgcggctgggctgcgaacagaaaccaaaccttgcttctgccctgataactcgttttccgtccccggttggagggtgtcgtgaggggggaaatccggccggaatgaattgctgcggggaccgtttgctctctttggagtgcgcagcggttctaagctcgtgaggaacctcgctaagcaccggcagactcccatgtcccctccgcaattgattccgcctacttccccgggacgaaagactcatatacacaccccgtccgctggccgtaccggcagcgtcctcacctgcttaactagttgacattgctgtctgaaccgttacactgaaactacaagataaaaccgagggtccatcactccatctccaaatacttcttcacatactgtcccgtataagatatatcgctcttagcgacctcctccggcgttccccgggcaatcaccgtgccgcccttgtcaccgccttccggtccgatatcaatcagataatccgccgtcttaatcacatccaggttatgttcaatgacaacgaccgtattgccgccgtccgacagtctgcgcagaatctcgatcagcttatggacatcggcaaaatgcagtcccgtcgtcggctcatccagaatgtagatcgtctttccggttcctctcttgctcagctccgtcgccagcttgatacgctgtgcctcaccgcccgataattccgtggacggctgccccaggcggatataggaaagccccacatcgtaaagcgtctctatcttgcggtaaatcgacggtacattctcgaagaatttaagtgcctcctccaccgtcatgttcagaacgtcatagatgctctttcccttgtatttaacgtccagcgtttctctgttataccgcttgcctccgcaaacctcacacggaacatagacatcgggaaggaaatgcatctcaatcttgataattccgtcaccggtacaggcctcacagcggccgccctttttattaaagctgaagcgccccttattataacccttggctttcgcatcggatgttgaggcaaataaatcacgaatcaaatcaaaggcacccgtgtaggttgcagggttggatcgcggcgtacggccaatcggagactggtcgatcgcgataatcttatcaagctgctccacaccctcaatcttcttatgcctgcctggtattgtgtgcgcgcggttcagcttcttggcgagcgccttatatagaatctcattcaccagagagctttttcccgaacctgatactcctgtcacacaggtcatgacaccaagcgggaaggagacgtcaatattcttcaggttattctccgccgcccctttaccgtcagccagccggtgggcgtcctgcgctccttcgggacgggtatcctctcgcggccgctcaggtaagctcccgtgatggattccttacatgccataatctcatcggccgttcccaccgcaacaacatggcctccatgttctccggctcccggcccgatatccacgatacagtcggccgcacgcatggtatcttcatcatgctccaccacaagaacggaattgccgagatccctcagatgcagaagcgtctgcagcagcttgtcattatccctctggtgaagtccgatactcggctcgtccagaatataggcaacgccgaccaggccggaaccaatctgggtagcaagacggatacgctgcgcctcgccgccggacagagtgccggtagccctggacagggacagataatcaaggcccacattaatcaggaaagacaccctcgccttgatctccttcaaaatcggggcgccaatcgtctcctgcatcgtcgtaagctgaagctcgtccagaaattccctgaacttcacaatcgacatattcgtcgcttcgtaaatattcttatctccgaccgtaacggccaatgcttccggcttcagacgctggccatggcaggcagggcagggtgtaattctcatatatgtctcgtactccgccttcatggattcggaaaatgtttccctgtacttcttgttcatgttctgtatcaggccttcaaaggctatatcgtaaatgccctcccccctctggcccttatagcggacttttacaatctttccgccggttccccaatcaggatgtcatgaacctcctttgggtattcctcaaacggtgtgtcgaggctgaaatggtattcctccgccagcgcttccagaatcgctccgctgaagctgcccttgtcgcagcaggactgccatcccatcgcgacgatggcgccctgtttgatgctgaggctcttatccggtatcatcaggtcttcgtcaaattccatcttatatcccaggccatagcagtccggacaggctccgaagggattattaaaggaaaagcttctcggctccacctcgtccacactgattccgcagtccgggcaggaaaagctctggctgaacataatcggttcctggccgaaaacatctaccatcatcagcccgccggtcagccccataaccgtgtctatggagtcggaaagccgcttctcgattccctccttcaccaccagacggtcaaccactatctctatattatgtttgatatttttctccagctcgatggattccgtcagctcatataggttcccatcgattctgacgcgtacgtagccgctcttcttcgcctgttccaggactttctcgtggcgtcccttccgtcctcttacaatcggggccagaagctgtatcctggtcttctcaggaagcgccataatctgatccaccatctgatccacggtctgcttcttgatctcacggccgcacttgggacaatgggggataccaatccttgcgtacagaaggcgcatataatcataaatttccgtaaccgtcccaacggtggaacgcgggttccggttggtggacttctggtcaatggagatggccggggaaagcccctctatgctctccacatccggcttctccatctggcccaggaactgccttgcgtaggaggagagggactccatgtaccgtctctgcccttccgcataaatcgtatcaaaagccagtgatgatttacccgatcccgacaatcccgtcagaaccaccagctcatttctcggaatatccagtgaaacatttttcagattgtgctcattggcaccacggattttaatatattgcttcgccatttttctaactcctgtgtatacagaacaggttccatccatacacttccggcagtggggaaccgttccgtttcattcagcattttatctgcttcctcttattgttttaacctgtcttagctatcccagtatatcatatccggctgcgttttgcaaacatttgttcggcacatttttccggattttattggtttatttggcacgttattggcgattatgggaataactaagaaaaaatccttttacaggctccggaatggctacccccggagtgtaaaaggatttctttcattcttatttcttttctttcacctgatattaccgctcttcccggaaataattcatgccgagatgcgccggaatatggccgcccttattcttcctcatggaagagatgacaaggacaagagccgtaatcaggaacggcagcgcgtcgaagaatgcagtcgggattgcatacgtattcttcggtacgtaatatttcagtacccggagcgctccgaagataaaggaaccgtaaattacattcaccggcttccaggaagcaaagataacgagcgctacggaaatccatccaagccccgccacgctgtctctcagccagacgccgctgttgataatcatggagcagtacgccccgccgattccgcagatagcgccggaaagcagaatgttgatatagcgccattttgtaacctcaataccggccgcgtcggcggctcccggattctccccgattgcctgcacattcaggcctacctgggttttgtacagatagatgcttgccaggacggcaatgaccagccccagatatacaaacggattgtaggaaaacagcagctctcccaccaccggaatatcactcagcccgggaatattaatatttctcatctgagccgtgattgtctccggaagctttagcgtccctccctcggagcgctccagcataaacacgccgataaaattggaaagcccgacgccgaaaatcgtcatggtaagacctgtaacattctggtttgccataaaggtaacggtcagaactccgtaaatcagcgcgccgaacatgcctgcagccgcagaggccagaattgcaaccagaaaattatcggacagataacctgccataaacccggcacaggcgcccagggacatcataccctccacaccgagattcagatgccctactttttcacttaaaatctctccaaccgtgccaaaaaggaacggggttcccgccagtaccgctgccacaagaaatttaattaagatgtctccgctcatgccccggcacctcctttccctctcatcacaaatttataccgtatgaacagctcgcatcccagaatgaagaacaggataattccctgaagcacgtccgcactgtctgaggacagaccgaaggaagactgcacaacgctgctgcccttttccagaatgctgaacagaaccgtgacaatcagaattgccggcgggttgagctgtgccagccatgccacaataattgcggtaaagccaacgcctccggccacggccgtcgtcagcgtgacgtctgaaccggttgcctgaaccattccgccgataccgcatacggctccggagaggaacatcgtgcgaagaatcacctttcttacattcatccccgcataccgggcagtctcctggctctcgcccaccacgccgatttcatatccctgtttggaatatttcatataaataaataccagtacaagcagcacaagggcaataatccagccgaactggataccaaacactttatcaagagccgcattcttatcaaatctggctatctttgcatatccctgtgaaccgggatcgcgccacggcccctctctcaggaacacgataatattgagggcaatataattcaacatcaatgtgaacagagtctcgttcgtatcgtattttgtcttgaaccaggccggaatcaggccccaaagtccgcccccacggctcctgcgatgaacatgacaatcaccagcacccagtggttccatccggaatgaaacagtgcaaaataagacgcgcagatgccgcctgcaataatctgtccctccgcgccgatgttccagaacttcatcttaaacgccagcgttactcccagcgacgcgatcaacagcggaatcgcaattttcaccgtcgcctgtatggccatcccgcttctgagagctccggtaataattgttttataaatgacaaatggattctgtccgattatcaggataaaaagcccgccggccaccagcgccagcagaatcgcttccagacgcaggataaatgtctccctgctgcccagctccgcttttttcactacacggattaacggctcattcatgctttttcctcctcttctgaaataggttccggtattttatcttgctccgccgaaagctcttgtccggatgtctctttcattgcctcagcagcctcggcgcctgtcatcatcagaccgatttgctcctttgtcaccgtcttcgcatcgaccactccggttactttgccgtgacagagtaccatcagacggtcggacagttccagaagcacatccagatcctcaccgatatagataacggcgactccctttttcttctgctcattcagaagatcatagattgtataggaggagttgatatcaagtcctctcaccggataggcggtgattaatacctggggacttgactcgatctcacgccccagaagcaccttctggacgttgcctcccgacatcaggcggaccggcgtatccactccgggagtcacgattgccagcttctccaccagcttctgcgccagctccctggcaggctttcgttccacaaaggggcctttcccctccgtgtaagatttcaggagcatattatccaccatgcccatggatgccacaagccccatgccgagcctgtcttccgggacaaagctcatactgattccaagctttatgatctccgccggagtcttacccacgatgttttccttatgatacaggatcgctccttttttggcagtcatcaggccggtcagcgtctcgcagagttccttctgcccgcttcctgccacgccggccactcccaggatttcccctgtcttaatctcaaaggatacatcatcaagcgctatagaaccgtcgcttttatctacagtcaaatccacaacctttagtattgtatcgcgtttttccatctcagggcgctcgatgtttaagctgaccggacggcccaccataagctccgtcagctttttctcgttacactcgcttgtattcaccgtatcaatactccggccttttctcagaattgtcacccggtcgctgatggaaagcacctcatggagcttgtgcgtaataataatgatggcacagccctgttccttcatcttgcggaggatggcaaataatttatccgtctcctgcggagtcagaaccgcagtcggctcgtccagaatcagaatctgggctcctctatataatacctttaaaatctcaaccgtctgcttctcactgacagacatatcgaaaattttcttttcaggttcgatttcgagtccaaaagaccggctgatctgctcaatcttctcttttaaagcttttcttcccagccgctttccgccggtccccaatacaatgttgtccatcgcgctgaatacatccaccagtttgaaatgctgatgaatcattcctatccccaggtttctggaatccacgggcgaattgatcgccacctcttttccgcccaccaggatcgaaccggaatcaggatgatagatgccggaaatcatattcataagcgttgtcttacctgagccgttctccccaagaagagccataatttccccgtattttaccgacaggtcgattttatcattggcgaccacgcttccgaatacctttgtaatctgtctgcactcaatggcatactgctctgtcatttcttcacctcttgtttcgttacaattcacagccccgccaaaaatgcgtctctgcgaacagtaatatgctgcgcgatgcccgcgggacagtcgctgtaaatagtaaccgtgattcggacggcgtcaaaaaagggatgccgcaaaatgagaatttatgtaattcaccatttttaagcatccctcatctttcagcctgttttagtggtattatctcattctgataacattatttctcaacaacgttcttgaaataccagtgaatgtttcctgtaatatccgcatcagacatatgctcgccctctgtgcccacggttgtaccgtcgttgcactcgattacgccgtcaaatacgtcccattcgccggaaacaatcttagcttttgcttcttcgatcttctctgctgtgccttctgcacaaagatcggataatggagccaggtccacaagaccttcttttaaaccgccgaagtaattctcgcctgtccatgtcccgtcaacgaggctctgaacggctgatgtataatatgcgccccagttccatacagtggaagtaagaactgccttaggggcatccttgctcatgtcggagttgtaaccaacgccgtatactccgttttcctcagccgcaagctgtgggttgggtgtatcacagtgctgtccgattacgtcgcagccttcattaattaaagctacggcagcctgtttctcaccttccggatcataccagctgttggttgtcttgatatatacggtcgcatccggatttacagagtaaacacccatggcaaatgcattgcatccgcctgtaacctctgcgttgtccttgccccaggcgcctacataaccaatcttgttggactctgtcttaaggcctgctgcaataccggataagtatctggactggtaaattcttccgaagtagttattgaagttaacgccgtttgatttatatcctgtaccatgggagaagataacctccgggaactcgtctgcaagcgcttcgcatgcatccatataaccccagcttgtggcgaagataatctggcatccttcttccacgcactctctcatagccgtctcaattgcagtctgatcatcatccgctacattgttcttgcggataatctggctgtcttccagacctactgcttcctgcatggcaacaatgccaagatcatgtgcataagaataaccggagccgtctgccgggtttccgatatggattacgccgaccttcaaatcttccttcgggattgccggcataacaccctctgccgccttagcctctcctgtctctgctcctgcttctgctgtctctccggctgcttctgccgctgattcggtctgtgctgcggttgtttccttgccggatgaagatgaacatcctgtgcagagggaaagtgccatagctgctgacagtaccacgcttaatacttttttcatttctttcctcctcaataaaaataaatgaatgtcaatactgaacaattattacattttctcctaagttttgcaagagatttcacggaatttgtcgagtttttttcatataacttgttttaacggcaaaagccccgctttaccgggattgcggctcttccgaacattgataacaacgataacctgcacgctccgggtacaggtaaccgcctccaataaaaaggggaggctgctttacgggaaataaagcagcctctatatggcacaaataaagaattgttatctgaaattcaaaaatccggtccggctattctatcggtttttcaggccggatatgacaaagcctcaaaaaagcctccatagcctttgtcatatatcttccttttttgcgggtcataaaaatttccctgcgcgccagagggtctccgattttataataaatcagggcatccgtatcggatacaaggctcaaaaggctgtttcggataaacgcaatgccggaaccggatttcgcgacataaaatgatgtcataatctgatccaggaataactccaccttaggttcaaaaccggcattcctgcaaatccccctgctgcgcatacaaatatcgttttcctcttttaaaaagataaacggacagtcccggaatgcctgcatcggcaccggctgtacatctttccccctgaacgcaccgtccctggcctgcgcaaatgccatctgaaagctccgcagctttttatttacttcaaattcagccgggacggccagaattatctgttcatagtcgtagagataccgttccacctcatccccggccggaattgccgtctcaagcaaaaggtcaatcgaatcatccaggagtcctgcccggagttccctgatattcccctcatggatttccaccgatacgcccggatacttattcttaaaccgtttcaaaagtcccgccagaaggtaagcacagaaaaaagaagaactgcctaccgaaagatgtcccgtgttcatatccgccatatctttgaaatatgcgtccatattcttctcaagacgcataaactgttccgcgcatttgatataatactccccctctttcgtcacggtaagggggattgtgcttctgtcaaatatctggcagccgattttggcctccgcttttctcaccatggcgcttacagccgattggctcacaaacagtttctgcgccgcttttgaaaaactcttttcctgatataccagataaacatattccatctcaactgacgccattgcctcccccttatcctttcactcccggtatcaatccgcctgtccggttctttgttctggctatcccagactgtagaatatcggtccgctgggtcccagcggaattttaaacaatacaaacacaattaaaatgacgctccacgcaattcccatgaccagtgaatagggcagcatatttgaaaacagggttccccatcccgccttcttatcgtatttctgcacgtacgataaaagaatcatcacatatgggaacagaggagaaagcacgtttgtaattgagtctccgattcggtatgacatctgcgttacagagggatggaggcccagaatcatgaacatcggaacgaaaatcggagccatgattgcccattttgccgatgcactgcctatgaacaggttgataatccccgaaacaataatcagtccgataattaagccgatacccgtgatgcccgtattctcaagaaactcggcgcctttaacggcaaatacggtagccagattgctctgtgaaaaccaggaggtaaactgtgccgagacaaatacaagcacaatataaccgcccatatccttcatcgcagctatcagcatattgacaatatccttactgctttttatcgtgcctgccactctgccgtacacaacagccggaacaaagaacatgatggttacaatactgataatccccttcataagcggtgaattattgctcataatcgcccctgtttccggatccgccaggaatgcatccggtccgatgcaaagagccacgattgccagacagattgcgataaaacagacacctgcccattttattccctttttctcctccggcgcaagattggcatcatgctccaggcggacatcgcctttatattcccctaatcgtggctctacaattttatcagttgtgattacgcctgtaaataataaaataaaggtagagacaatgaggaaataatagttcattgcaatattgccgctgaatcccggatcgatactctgggcggccgatatggtaaacgttccggccagaacatcgctcatggagatcagaagattagccgccatacccgtcgatacggacgcatatgccgcaaaaatacccacaagagggtttctccccacggaaagaaacagcagggccgcaagtggcggcaggacaatccatccggcatctccggcctggtttgccatgatgcctgcaaacacgacaataacggttacggttctgccgctggccctggcgcccgccagccggaccatcgaggtaagccagccgcttttttctgcaaggccgcagcccagcattatagtcagcacggctcccagtggtgcaaatcccaggaaattacttgggaagttgattaatattttttggagatttgcgattgttagcaggttaaccgcggtaatcgtctcccccgtaccgggatggaccacgctggctccggcagtaaaaaacgaaataattaacagaagaacgcagagaaatgcaaacagtacaaccggatcaggcagcctgtttcctgccttttctatttttgcaaggatcctgatatacattggttccctgtctttctcactctttattcctgcattttcattcatgatgttcccctcctcattaaaatgacgcttatccgttttctattcgaagtacggccttaccccttcagccgttttcattcacattccttcgaaaaaatccggaacccttctcttattccatccatatcaaaaccggacatcagcataagaatcagaagcagtcttgcttttcttccgtccagaaagccggaactgataagccctttggaaagcagagacgtctccgaacctgggtagcctgcataagttccggtgagcatgtcccccggccgattctggatgccagaactaccggcattttatccgcaagctgtttcagtgtctccaccagctccgatggcgtgtggcctcctcccatcgcttccagaaccaggccgtctattttgcagtctagcgcacactttagcagtttcccgtcatctccgacaggaacggcgtaaattggaacggatacaggctgatccggtcttttcccatccacattccacttatttattgcaagtccggggattcttctttgcagcggcttcatacggatgcttggctttccttccgccagatacccgagaggtccgcattctgccgcaaaagcctcggtactctgtggatgaatttttctcacatataaagccgggtaaattgcatcattaaaaactaccatcacgccgagttctctgcaccggctgcaggagacggtccggattgccgccagaagattggccggcccgtctgctcccctcatgtcgggatttcgcattgcgcctgtcacggccaccggtttttctgaatccagcagcatctccaaagcaaaggctgtctcctcgattgtgtccgtcccctggaccaccaccacgccctctgtctccccctctaacaaggactggatttcggccgctaacccggtgatatcgcttatcaccatcgaagaacttgatttttgcctgaacgccttcaccgtaatatcggcttcttttttcacctcatcaagtgaatctataaaacctgtcagatcccctatttgaggaaccccgtttttccatgtataggcaatcgtccctcccaaagtcaaaacactgatatttttcaacacattcctctcctttactgtcactgagtatttattttgccgtccgctctccgtataatgcgctgcgctgcgtatccgcaatctgatagttaagctgcatttcctgcgctgttttcaccccggctttcgtggttagaaacgttcctccgctccccgttacccggccgtgatccataattctttttccgccggcaaagctcattgccgcgtcaagacgtttcatatccaataccgttatatcggcatctgctccgattcccagatttcctttttggtgcagcccgaacgtctccgccggattgaccgagcatttttccacaatctctttcagtgacaaatatccaagccggtaaaacgggagtaatttctgtaccagtccgtttctgggaaatcctccgccatctgtcgccgccagctcgattaaggggagctgccaggtatcctgcgctctgtcaggcaagccgacgcaaccggggccagattggcgggaaagctcacatttatgttggtgtcgcggccggaccagtattggaatgcatcctctttatttaatagtacgttttcctctttcagggatgcaattgcacaaacggttccgtccttcatcgctttcgccagtcctgcctgggtaggctcgtaaccaaacatcttcaggcaattgacggtgatagcgtcgcagggtattccattcctgcatgcaccgctggttccgttgtttacagccatgtgggaatccgaaataatattcggattttctctgagcatctgaaatgcgtctctcaattcttccaggtaatgataccggtttccacggcagtaggcattaatgtgggccatcagaagcctctgtccccgcgcaaattcaaccgcttcctgtaagccgtatatatcgcttctctgctgcgtactccctgcatggcaggctatcattacttttttagcatttgcttcctccacacacagcctggaagactccggggtaagaggataatggccgccgaggattttaagtcccagagagccgtttttcagggattgctccagaaaccttctgacctgcgttctggagggcgactgtccaacctctccgggaagcactgcgtcgatacagccaacgttcattccgcatccgtgtgatgaaatctgggatgagatatcggtcacaggccccgcgtaatcaataatcgtcgtcactccggttttggccgccatataatacccgactctgccgcccagcagctttgtcacatgcacatgcatgtcgatgacccccggaatcaccgtcaggccggaaacatcgtatgtctcttcaccatgcggcagttctttttccagttccgctatcctgccttctcttatccctatatcaagacgctcatccacatggtgaaccgggtcaaatacacggccgccttttaatacaacgtcaaatctcatctgttcctccgttcataccgtcccgcagcgcgctttgcaaggacaggctcttcgcttctatactgaaactttctttttccatccgttctcatgagggatgtgtttattataacgattttccggcaggatataaaatgtcataaatacattcatataagttagaaaccgctgtttatacctgatttctgtttatgccccttactccagggcagaacgataacctgcacgctccgcgcacaggttaccgccatcaatgaaaataccctggcggcaatttaattctgccaccagggtataagtacattttaatattcattcagaggacaatattttatcgtttggggactctgcatctaagcttcgcaggtgtctttaagattcaatctccaagacaatttccgccgtaccaacggctccggctttttcgttgagtatctccataaattcttcacctgtaatcgtctctttttccaggagataatcggccagttcgtggagttttttctcatttcccatcaagattgattttgccttctcataggcatctttgaccatctctattacttcattgtcaattcttgatgcagtttccgcagaacaggccagcgaagcatctccgcccagatacgcattattcaccgtctccagagctaccatgccgaactgttcgctcataccataccgtgtgaccatggctcttgctatctttgttgcctgttcgatatcattggatgcgccggtcgtaatggaatgaaagatcaactcctccgctgcccggccgcctgtcagtgtcacaatcttattaaacgcctcgtctttgctcatcaaaaatctctgatctgcctctacctgcattgtatatccgagcgcacccgatgttctcggtataattgtaattttatgaaccggagctgaatggctctgtaaagccgctactaaggcatgaccaacttcatggtaggatacaatctttttctcatccgttgagacgccggcgtcttttctctgatatcctgcaattaccgtctccacactttcttccagatcggcctgcgatacggtcttccttcccatcctgaccgccctcagggccgcctcattaataatattggcaagctccgctccgctggcaccgctggtggccctggcgattgcattgaaatctactgtttcgtcaattttcacctgctttgagtgtaccttaagaattgcctccctgcccttcaaatcaggaagctcggccgggattcttctgtcaaagcgacccggtctaaggagcgccttatccaatgattcgggacggttggttgcggccagaataacaacacccttccgtccgtcaaatccatccatctctgtaagaagctggtttaatgtctgttcccgctcatcattgcctcccatgcctgcaccgtcacgcttcttaccaattgtatcgatctcgtcaataaatacgatacagggtgctttttcattcgcctgcttgaagagatcgcggacttttgcagcgcccattcccacaaacatttctacgaattccgatccggatattgagaaaaacggaacatgcgcttcacccgcaaccgcttttgcaaggagcgtcttaccggttcccggagggcctacaagcaaagctcctttcggaagtatagcgccaatctccgcatacttctggggattatgcaggaaatcgacaatttcctgcagcgcctccttggcctcgtcctggccggccacatcggcaaatgtcttgcctgtctccgattccgcgtaaattttcgcattggactttccaaatgtcattgcgttgcctccgcccatccgtttcatcattgcacggctcatcagctggccaagtccaataaaaataatcagcggaagaatccaggtaaccagaaaattcagaagaggggatgcctgggtcggaatctcagagctgtatttcactacgccggcatccgtaatccgctgctgcaaatcgtctcccggaaatgaacctgtcttatagttaattttccacttactgtctttcagagtgtatactatttcgccattcgtagttacataaacctcatctacatttttcttgttcagttcatctacaaactgatcgtatctgacctgctccgtccggtccatcagggacggaaaaataaaaatattaagcagcatcaataccagcatgaccagtccataataatataggaaagattttttaggtgctttattgccgtcgttgctctctttcatgttgttctcctcttatttgtatcattgttttatataataaccatatcaggcgctttttaaaattggcggagttttgtacgaatctccttcaattttttcatcgcactgatttattaaatatatacctcttatatttatatttgtcaatatttaatagtcaatatttatttaattttaataaatattgacttgtatttcgaaatatgctaggatgtgaacgtgggctaatcatctgattccctactaatatgcttgtaattaactttatattttatttggaggagttatttatggagaatatagaaaacagaataaattgtgaaagcggcggaaacccggacattaattccgtgggtgtacattttcttgaatttgccgttgctttccttactctggccaaatgccagtaccagcatgaaaatgacgtcaaagtaaattccctcccctttttcaccctggtggcacttgataattgggctgatgtggattataccatgtcggaacttgccgataaattacagataaccaagcagcagctttccaaaatgatcaatgttttagaggaaaaggaactggtggagcgcatccacgataaggaaaaccgtcggcgtgtttatattcgtatctgtgaccgcggccgtgcgatgatggacgatataaaaagggggatgcttgaatcaactctttacggactcagttcctatacggatgaagaactcagggagatggattactgcatacgaaagctgacggaattgatggagaaatttaatataggcaattgcggggatgcagatgaatagggcccggtagcggtaagttagtttatccggcgatttatatgcggcagatgcagattatgaactaaagtataatctgcatctgccgcattcttgtatatttatgtaattcaaaatataattttcttcagctcttctttccattcattgtcggcttctataattttccttatccgaagtataatgacctcgtaatgcaattaggaatttcgaaaaatatttcaaaaagaaaaaaaggagagtgcattaattatgagaaagcagactaaattagttgcagttttatctgcagcagctttactcgctatgggtgcttccatgacatctttcgccgctggttgggaaaaagatgattctggtatctggcactattatgatagtgatgacgaattggtaacaggtgagtggaagaaagacggcggaaagtggttctacctggatgatgacggcgaaatgctgacagacagctgggttgacgatgagtactatgttggcaatgacggcgctatgctggttaattcctggattaagacaacatctgatgaagatattgatgatccggatgaggatggcgatcattggtattactttggaagcaaaggtaagaaaacaaccgaatccaagaaaatcgctggtaaaacttactactttaacgaagacggcgaaatgcaggacggctggtatgaagatgacggagacgtttattacttaggcggagaagacgaaggctggagaaaagaatctggctggttatggcttgaaaaaccggatgatgatgacgatatcacaggatgtgatgatgagtgcagcatctgcgacgaggaaggctggtactacttcggaagcaatggtaaaatgtacaaagattataagaagaaaaaagttaatggtaaatactactactttaatgaacatggccagatgttatacgagtggattaacgacgctaaggttaaggttaaaggttccccatctaatgcagaagctgatggtaatgtagccacacctaataaggccgaaatcgaaaatatgctttacatgaatcaggttgaagaaggttggagagctgacggctggtacgaaatagatggtgctgaagatgttggtacggataatgatacagactggtactacttcgatgatggtgaggcaaagagagctgactccgataaagactttgctcaaattgaagacaatgatgagactccaatctggagagcaaagattaaaatcaaagcaagcaacaacaagtatttctgtttcgatgaagttggtcgtatgcagaccggtttacagtatattccggcagctaaaggtttctactactttgatgacaatggctatatgaagaccggtaaagttaccaatgtagaagatgatgatgattcctacaccttctatttcaacaccaagaacggcaaaaacggtgaaggtgtaaacggtgaaaaggataattatctgtatttcagcggtaagagactggaagctgatgatgattacagattgtacttatcagagggtaaagtttaccttgtaaataacaaaggtaagatccagaaatctaaaaccaagaaatatgatattgaaaactttgatgaagaagtaactgtagcatttggaaatggagattctgttaagtccctgactgtaggtgacaagacatacacacttcctgttgttatagaaaatgtaaaagatattgcaacaatggattccaaggttgcgaaagctattacagttccagagatcaaactgtatgacaatacttacagctatggagttgttacaaatggcgatatcgtaagaacatgggtcgctgaagcagataccgatgcattatctcttaattaattaaaaggaacctccccaggttgtaacttggggaggtttttctgcaatatactagcgggaacaaaatattgacaaaaagctgcaattagagacttgatttccttgttagcaaaaagcggttctgagaattacaagatagtaatcgcttccgattccatagattctataatcatcatcagcttccagtctctttccattccagtacagatatccactgttttctccgttgatacctttaccattaccaccattcttagtctggaagtaatatgtgaaggaatcattttcttcttctacacttgacattttaccagtcttcatataacctttatcatcgaagtaacagaatgcattctgggccggaataaactgtaagcccatctgcatctggcctttttcattaaagcagaaatactttccttccactttattttagctctgtaaacagtatttccgtcatctgttaactcaggaccagtaagtccagatttatcgtaataggatgcctttttagcttcaccattcttgaaataataccaatctgtatcgttgtttgtttcaaggtcttcagaaccgtcgatttcgtaccagccatccgctctccaaccttcttcgtcacagatatcaatatgatgccgctcaatcatcaaaaagatgaattagcgacatctcgtcttatttttttatatttacctagcgatacaaatttttaacatcacctacgttaaggttaattgcaagatagtatctgaatgatactgtatattaggaaacgaatcaattctaaaatcacgtttatattaatcgctttttatatagttccaatcatatcgcaaaatgaaattagaaaaatatgtctggactgtgctgctttcgcaatacaatcctgtgtaaatgaatctttagcaaaaatgtaataccatttcttttccatatagaacagtgagccttgtgctaataaatcattcaacacatcacacccaaccggggcgttctgccatttacattcacccagaagaatattatcatcatcaattgctgcaatatctatttcctcctggcgtttttcgacaggattattccccaccaacgtccggatttactgtaaataaacggagctttggctataatttgaggcaggtaaagatactgccgacatatctcttcaaagaccaggcccatataatgattcaactgaggttttacctgtttttcatagatgatgcttccaatgcccgaacaattccgctgatattcggactcacaaagcgataccaaaaacggaacatctgatcctccaataaataaattgttttccggctggattccttttccgtaatgggaacttcctttcggacgattcccagttcaatcagcgcctgtaagaggttgcttgcagcgccggtttctatcccagcctttgttgcaatttcattcattttactggcaccgccggcaatggcgcctatgacagaattatatgtggacggatcacggagttcctgttttaaaaggttggaaggttcctcgtagagacggccgctttctgtaaaaaaaagctccacaatattttcgtccaaagtcaatttggatgaaatgcggctgatatactccggtatacctcctgtaattccatataggattgcctgttcttccgatgaaaaggaaggacacatcgccctagtctcaaaaaaggtgaaaggatggattttaaactgagctgttcttcgtccatagagagggctctggtatcctaaaacctgatgttccataaaactcatagaagaaccgcaaagaattaggaagagctggctgttttgccagctatggtctatatgtgcctgcaaaagggacgagatagccttataacttgatgcaagatatggatattcatcaattaccagtataaggcgtctttccatgcagataccgtcaatatacgtcaaaagctcatcatagcttgagaatgatggagatggggcattcggattgacggtttggaaaacggctttggaaaattgctttagattctcctggccagttgcttcagatgcgacaaaaaatatagtctctttattacgacaaaattcattaatcagagttgttttcccaacgcgccttcttccgtaaaaaacggccagttcaaattgagcgcttgagtacatactctctagcttatttaattcacgctgtcttccaacaaacatatagttctcctttatatatattaaaattactaatttatgatttagtaattttatcataagttaatttatgatatttgtcaagggtttaaattttaaaccaaattcaacaggagtgtttgcttttaaataattattcatataaatgtcttatataatttctgttttcgattaccttttttcaataattacatctttccttacttttccttatccgaagtataatgacctcgtaatgcaattaggaatttcgaaaatatttcaaaaagaaaaaaaggagagtgcattaattatgagaaagcagactaaattagttgcagttttatctgcagcagctttactcgctatgggtgcttccatgacatctttcgccgctggttgggaaaaagatgacgctggtatctggcactattatgacagcgatgatgagatggtaacaagcgaatggaaaaaggatggcggaaagtggttttacctggatgatgacggtgaaatgctgacagacgcttgggttgacgatgaatactatgttggcaacgacggtgctatgctgatcaattcctggattaagactactgttgatgatgaagttgacgatccggatgaagatggcgacagctggtattattttggaagcaaaggtaaaaaagttaccagcgattccaaaaaatcaacggcagaacctattactttgacggagaaggccgtatggaagatggctggtatgagtctgaaaacggtgacgtttactacttaggtggagaagacgaaggctggagatcagagaatcagtggttatggctggaaaaaccatcagaagacgatgagatcggtaactgtactgatgatgataatgatccttgtgatgaagagggctggtactacttcggaagcaacggcaagatgtacaaagaagctaagaagaaaaaagtaaatggcagattctacttctttaacgaacatggccaaatgctttatgagtggattaatggttccaaggtagcagtaggttccaatggtaacatggtacttgatggaaataacgctggtgcatctccaagtgatatgctttacatgaatcagatagaagaaggctggagagctgatggctggtatgagattgacggttctcaggatacgaataccgacaatgacacagactggtactacttcaaagatggaaaagctaaaaaagctgaggactatatcacaaaagatggtgataacgtagcaatcttcagagaaaaaatcaaaattaaagcaagcaataataagtacttctgctttgatgagtatggacgtatgcagactggtctccagaagttaaaagacggtttctatttctttgacgataatggttatatgaagacaggaaaagtttccaatgttgaagatgatgatgacgcctttacattctacttcaatacaaagaatggcggaaacggcagaggctggattggtgaaaaatcaggatatctgtattggaacggtaagcgtcttgaggcagaagatgattacagaatctacagagttaatgataaatattacttagtgaatgcatccggtaagattcagaaatcctcttccaagaaatatgatatcgaagaaaatggcgatgatctttacgtaaaattcggtaacggtgatacggttgaaggactttatacagataaagaactgacgaaaccagcattcaacgatggtactctgtttgtatatgaatggccgcatattgcactgtatgatggtgattggactgaaaaaccattaaccagagctgctgcagatggtgactttttaggtgaattaacagctgaataatttatttaaaatggacggtggattttccaccgcccatttttaatcatagaattttgaattgttataaaatttatttatttgggttgttaagtcctaaccaaccttctgttggggttgaatttttcttgatttcggtataagtgtaaaggtcatcatcgtaaagctggataaacggtactgataagatcatatcgtcagtaacattttcataattaccgttgatttcgttaatcatttcagcaactaattcatcatcagtatactcaaaattggaacctttaatcttggtaactttcttgccactgattgttacttctacatcatcctcagcaattcccttgttttcaaggtcatacttcttggaagatttctgaactttaccctttttatttaccagatagatgtctccatcatagtaatagagtctgtaatcatcatcagcatccagtctcttaccgttaaagtacagatagtcatctttcagtcccttgtagccctgaccattcttaccgttcttagtgttgaagtagaaggtgtaatcatcatcatcacactctacacttgttacacggcctgtcttctggtagccattctcgtcgaagtagtagaagccgctgtcagcgttgatatactgtaaaccatcctgcatctggcctttttcattgaatgcaaaatattttccattgattttgattctctgaacgtaaaccatcttaccatcttcatcgtaagtggcttcgtctttataaccgccatcagcgtatttgatttcaccgtcatctacgtagtaccagtctgtatcaccatctgtacccacgtcttcagaaccatccatttcataccagccgtctgctctccagccttcttcaacagcgttgtagtatctcatatcctcaacgcttgcggaaccagcacttgccacaccatcaagctgcgcatttgagcttacagtctttgcggtaccgttaatccactcatacagcatctggccatgattgttgaacatatagtatcttccattaatctttttcttgtttgcgccggtataaactttaccggaagactggaagtaataccaaccttcgtcatcgcagtcgtcatcttctgtacagccgagaacaacttccaggttgtcatcatcatctaagtcatcttcgtcgagtccggatttctcaagccataaccactggctctcagctctccagccttcgtcttcaccacctaaatagaaagcgtcatcgccatcctggtgccagcctgttaacatctcaccgtcttcgttgaagtagtatgtctttccattgatcttcttggaatcatcagtaactttcttacctttgtttccgaagtaataccaatgctcaccaccgtcatccggatcatcttcctcatcatcagccagagtcttaatccaggaatttacgagcatacgtccgtcaccgtctacgtaatattcatcatcaacccagctgtctgtcagcatttcgccgtcttcgtcaagatagaaccagtaagcaccatcctttttccactcatcggttaccatctcatcatcgctgtcataatagtgccagataccagcgtcatctttttcccaaccagcggcgaaagatgtcatggaagcacccatagcgagtaaagctgctgcagataaaactgcaactaatttagtctgctttctcataattaatgcactctcctttttttctttttgaaatatttttcgaaattcctaattgcattacgaggtcattatacttcggataaggaaaattatcgcaagttaaggatgttttatcaccctattttgtcatactatttcaacataaaatagatttacttgtattattaagtaaatattcattgattctcaatcaataggatggtatagtagtataagattttttatcactgaatttttgataacatggatttgggtaatttatttgggatgaattatggtatatttatgcagaaaatctgttcaaatagaacgcgggcagcggtatttcctgtttatttatcatgtcatcctttccaagatccttgtgattcatcgttacagttcggacagtatgagctgttacgatgaatcacattcacaaatttaacatttgaaaggagcttccattatgaaatacctatccgactccctgccacagactgcctgcatccccctgtccttcggcaatgaagcccctgagcaggctttagggattctctcaccggaacctgcttccgatgaagaaaaaagggaatatgcaaaacagaccgctatccggcatgccatgagcatcgaagattaccgtctctatctttcagcacaaaatatgtcggaaaatacaattcacgtatatgcttacgctatccgccagttttttgcactataccacgaaattacatattccaatttgaaattgtataaggtttttcttctggaacattacaagccgcagaccgtcaacctgcggattcgggcgctgaactcgtatattgagtttaaaaagcttaatcctggaaaaattcctatggtgcgcatccagcataaaaattatcttgacaatgtaatcagcgaggcagattatgaatacctcaaaaattgtctgctccgtgatgagaaatacctctattattttattatccgttttatggctgcaaccggagcgcgtgtcagcgaggtaatccagtttgaagctgaagatatcttcaccggatataaggacatctactcaaaaggaaataaggtcaggcgcatctatgtacctaaagctctgcaaaaagatgctattgcctggttgaaagcaatcagacaggaacgcggatttgtatttctaaaccggtatgggaaccccattacccccggtggaatccggggccaactcaagaatatggctcttgcctacgggatgaacccagaagtggttcatcctcattctttccgccaccgttttgccaaaagctttatcgaaaaatgcggagatatctctctcctctccgatctgcttggccacaaaaacctggaaaccaccaggatttatctgcgccgttccagcagtgagcaatatgaaatcatcaacaaggtggtggactggtaacaagataacaggccaccgtcttcagtaaaaggagttatacatggaggaatcacttgaaaatacagtagaacaatttaaaatatacctggaaaagcagggacgctcagctaagactctcacttcctatgcctgctcagtctcaatgtttatttcactttgcggtgagcttacagtcgaaaatttgaaaagatacagggaatatctgctcaaaaactatcagctcaataccgtaaatacaagaatttacggtatgaaccgttacctcgactatttacaggagagcggccggcttcctgcttcactgacactcccctccggaggtcctcccgactggcaggaaccaatccacttaaatccggttaaaataacaagggacggcgtctacagaatgcagcctgtaaaagaacagaaaaaaagttatcttgataccgttatttctcagcgggattatgagcgcatgaagcgcagattaaaacaggacggaaatatgtactggtattttgtcatccggtttcttggtgcaaccggcgcccgggtaagtgaattactgcagattaaaatagaagatttgcgtctcggttatttggatctatatactaaagggggcaaaatacggcgtctgtacttcccacgaagtctctgcgcggaagccatcccctggttcatggaacgcggaacgaggagcggatttatatttttaaaccagcacggcaacctgatttcatcgcggggtattgaactcagattgaaacactttgccaaactatataagataaatccaaaaaccgtttatccccattcattccgccaccgatttgcaaagaactttttaaaacgtttcaatgatatttctcttcttgccgatctgatggggcatgacagcattgagacaaccagaatttacctgacccgttcaagccaggaacaaaaggccctgctggaccggattattacctggtgaatttactaaaaagaggaatcgcctgaaccggcactgtgccggaactggcgattcctcttttgggacttattgtacagtcccgttttgcctgtaacataaattatatagaacgttttacagcaccttgcttaaaaacgcctgtaatctttcgctctttggatgcccgaaaaactcattcggttcattttcttccgcaaagtttccgccgtccataaacattacacgtgtcgctacctccctggcaaatcccatctcatgggtaacgaccaccattgtcatcttttcctccgccaaatcacgcataacgcttaaaacttccccgaccatctcagggtccagagccgatgtcggttcatcaaacagcatcacatccggtttcatacaaagcgccctgactatcgcaatacgctgcttctgcccgccggaaagctgattcggataggccgcagcccgatcctggagcccgacgcgttcaagaagtttcattgcctcagcctcagtttcctctctcttctttccctgaagcttcatcggcgccagcgtcagattctcgaggattgtcatatgaggaaataaattaaattgctgaaataccatgcccatcttctgacggtgtttattaatatctgtttttttatcggtaatgtctgtgccttcgaataaaatctggccgcctgtcggttcctccagaagattcaggcagcggagaaatgtgcttttacctgagcctgacgccccgataacacataccacatcccctttgtatatatcgactgtcacaccgtccagaacggtattggctccaaagcttttttgaagatttttcacctggatcagaggttgatcccatatattagcgctcactctgcctcagcctcctttccagacatttaattaactgggtaaatataataacaataatcagatatatggcagccaccgcaagcagcggcatcgttgcactgtaagtgatactccggataatatccccgccttttgtcagatcctgaagcgcgataaaaccggcaaccgatgtctctttcagcagggaaataaattcattgcagagcgcaggcaaaatattcttaaatgcctgaggcataataatataccacatcgtctgaggatagttgaatcccaggctgcgcccggcctcaaactgtccgttatcgatagacattataccgctcctgaagatttccgccacatacgcgcccgagttgataccaaacgctaacacggcaaccggaactttgtccactctgaggctgccgaaaatgacatagtaaataatcattaactgcacgactacaggagtcccccggatcacggtcagataaagattacatataaaattgagtatcttcagtttatgagttttctcataagttgaacggatgactccgacaatcagaccaatgacaataccgagaattactgccagcagtgttacggtaagcgttattttaagaccatctaccaggtaaagccagcgatctttctcgataaaattaaaatagaaatcctcagtgaatttttgccacatatccttcttccttatctgttattttatggaggctgataccagcctccatcttatatctaacaatattaaacgtgtatctttattttactctgcatccatatattttgcaacgatttcgtcaatctttccttcttctttcagctctttgattgcttcgttcatcttctcaaccagttccatgtttccttttttgattgcaattgcatattcttcttctgacatcttctcttccagaatcttgatgccttctgtcttctttacaaatgcctctgccgtcgcctggtcaattacaactgcgtcaatctttccctgtgtaagggactgtactgcttcaagtcctttattataacgctctactgtagcatctttaatttcagttgcaagagcgtcacctgtagttccaagctggacgccgataatttttccagcaagtgcatcagagcctgtgatatcactgtcttctttcacaatggcaacctggtttgagtttgcataggtatctgtaaattcaactgatctctgacgctcttccgtaactgtcatgcctgctgcgccgaaatctgcttttccgcttgttactgccggaataattgcgtcaaaagccatatcttctatttgaagctccatgccaagcttagcagcgattgcttttgcaatttctacatcgatgcctacgatatccccgtcttcatagtattcatatggagggaattctgcattggtagccatcacaagtgtaccgccggctgcttccgccccgcctgtcgcctcctcagaagcttcggctgtctcgccctctgtctccggggctgcctctgctgtttgtgcctgtgttgtctccggtgctgctgtctctgccggtttcgagctgcatgccgtaagtgctgccgccatcagtgctgccattgataatgctaaaatctgttttttcataattatcctcctcttgtcataccggatgcataaacccacgatcggtctgctgtttccgaccgcatatttatgttaatattcgccatttttatgcatcaaatatgtataaatataaattttcttttctagtatttcattataacgtatttttaaaattaatcaagtacctgggccacatttttttatggtttccacaagtttatgaatgtttatgcaaataatccccaaccgtttcctgctattggcaaaattattattaaggtttatactacaaactagaaagtgaggtaaattttatggaagactggttgataaaaacggcctggccaatgactccgccgcttcccttttcagcatttcacatctgcttttccctattcggcctgagtgcggcctttaccctggcatggctctgcagacgtctgccgcgggcatacagagtacgcctcttgttctttctggggattctgctcgccctttcggaatgttataaacagatgtttctgtattatattgtcaatggccgtaaatacgactggtggtattttccatttcagctttgcagcatccccatgtatctctgcctcatcctgccctttacagcaaaattcggccggaagtgggaaaggctgctctgtacttttatgtactgctataatctgcccggaagtatcctcgtttttgcggctccgtacggaatgatgcatccatactggagcctgaccatccattcttttatgtggcatattttactcgtttttatcggactattaatcgctttttcaggtatgggttctgtatcatggaagggatttaccggctccaccgggctgtttctggcatgctgcgggattgcaacggctgtcaacattctggccggtccctatggttatccggacatgttttacataacgccctattatcctacgacgcagccgtttttttcaacgattgctgaacaatttgggattatggccggagatttagcctatatcgctgccattatcatgggcgcttttattcttcatctcatttaccgccgttatcaccggtaaaaacagaaaagcaaccatataatgatatgcccctgtctgtctgactggggcatatcaaaaccggctgcttatccttttatctttccacccttgtttttactctatatctctatttaatctatttgctctatttaatctattcgctctatttaatctcgctgtggaactcctgaagtgatttcacttcaatatttccattctttgtaatcgtcttaagagcctgaaccgtagccttcgctgcagccatattcgtaaagtacggaatcttgccttttacggctgccttcctgatatagctgtcatctcccagacctttcttgtcaagaggggtgttgattataatatcaaccttcttatttgtaatcttatcaagaatgttcggacgtccctcgtcaatcttggcaattttctcagccggaagccctgcggctgccataatgtcgtaagttctgcctgttcccatcagcttgaatccgcagtcatagaatcccttggctacttcaatcaattccggtttgtccatatcgttaacactgagcagtacggtaccggaacttggcagtcttgtctgagttgcttcctgtgccttgtaaatcgcttctcccagatttgcggacatacccagaacctcgcctgtggaacgcatctccggtcccagtaccgggtcaacctcagggaacatcttgaacgggaataccggcatcttcactccgtaatgaggaatcttcttctctgtcagtgtcggaaccggtgacggtcttcctgtcagatgggatgtcatgatgtcagttgccagttttaccatcttgatgttgcagactttggataccagcggcacggttctggatgctcttggattcgcttccagtacgtatacctctccatcctcaatcgcatactgcatattcatcaggccgacaacgtgcatttctttcgcaatgcggctagtatagtcgcggattgtatctacctgatctttcgtcagatttctggatggaaggatgcaggcggagtctccggagtggataccggcaagctcaatgtgttccattacagccggtacaaatacattctctccgtcgctgatggcatccgcctcacactctgtcgcatggtgcaggaaacggtcaatcagaatcggacggtcaggagtaacgcctacggcttccttcatataatatgtcagagcttcatcgtcatgaacaacctccatgccgcgtcctccgagaacgtaggaaggacgaaccattaccggatatccgatgcggtttgcaataacgagagcctcatctacattgacagccattcctgactcaggcattgggatttgaagcttgtccatcatatcgcggaacagatcccgatcctccgccatgtcaatcgtctcaggtgtggttccgaggattgttacgccgtatttcttaagatctgcggccaggttaagcggtgtctgtccgccaaactgtgcaataacgcccagcggtttttccttatggtaaatacttaaaacatcttccagagtcagtggctcaaagtacagtttatcggatgtatcataatcggtggatacggtctccggattacagttaacaatgatagtctcaaatcccagctctttcagggcaattgccgcatgaacacaacagtagtcaaattcgataccctggccgatacggttaggacctcctccgagaatcataatcttcttattgtcgctgcatggactttcatctttaatatggtagctggagtaataataagcagaatcttcggtgctgcttacatgaacgccttcccagccttccacgattcctgccgctgttctggcatcacgaacagtctcttccgaaatttccagaatttcactcagatatttatccgcaaagccatcaagcttagcctgacggagtacttctgtcggaggtacctgtcccttatactgcagcagtgcttcttcctcttccaccagctccttcatctgttcgataaagtagtgcttaatcttggtaagctcaaagagttcgtctaccgttgcgccttttctcagagcttcatacataatgaactgacgctggctggtcggtacatggagcatggacaggagttcttttttcgttttctggtcaaaatccttcacatggccgagtccgtagctgcctctctccaggcttcggattgctttctggaatgcctctttataggtctttccgatactcataacctcgcctacggctttcatctgagttcccagtttatcctcagagcctttgaatttctcaaatgcccagcgtgcaaatttaattacaatataatcgccggacggaacgtatttatccagagtgccgcatttaccgcacggaatctcatccagagtaagtcctgttgccagcatggcagatacgagggcaatcgggaagcctgttgccttggatgccagagcagaggaacgggaggttcttggattaatctcgattacgatgtctcggtcagtcttcggatcatgcgcccactgcacgtttgtaccgccgattacttcaatcgcctcaacaattttgtatgatttttcctgtaaacgtttctggacttcttctgaaatagtaagcattggtgcggagcagaatgagtcgccggtatgaacgccgagaggatcgatgttttcaataaaacaaacggtgatcatattgtttttagcgtcacgtacaacttccagctctaattcttcccagcctaagatggattcttcgacgagtacctggcctaccatactggcctgaaggcctctcgcacagactgtttttaattcttctacattatatacaaggccgccgccctcgccgcccatcgtgtaagccggacgaagcacaaccggatatcccagtttatcggcaatttcaagagcatgctctacggtgtaagcaacctcgcttcttgccatctcgattcccaggctctccattgcatgcttgaattcgatacggtcttccccgcgctcgattgcatcaacctggactccgattacttttacattatatttatcaagaactcctgccgcagcaagttcagaacaaaggttaagacctgactgtcctcccaggttaggaagtaatgcgtccggtctctctttatcaatgatctgtgtcagtctctcaacattaagcggttcgatgtatgttacatctgctgtctccggatccgtcataatcgtcgccggattagagtttaccagtacaatctcgtaaccaaggttttttaacgccttacatgcctgagttccggaataatcgaactcgcatgcctgtccgataataattggaccggaaccgataatcatcactttgtgaatgtcgtttctcctcatgttttttccctctcattgtctgcagtttacattttctaaaagccgctcagaagtcctttttgccaaaagaccccagtaaggcattatcaagattataatagaaaagttctgccttgtaaaccgaaaaaatgcgtttttctctttcctttttacattttttatgatatgctagtaaaaatatactggggtattattttaaaaagcagaaaggattcgtcaatttttatgaaaaaaatcgtagtaattgacggccagggcggccggatgggaaaaactgtggtagaacagcttaagaatacatacccggatctgcctctcacagccatcggcaccaacagtatcgccacttctgctatgctgaaggcgggagctgatctgggcgccacaggagaaaatcctgttatcacggcctgccgcgatgccgatttaattatcgggcccctgggaattgtcattgccgattcattgctgggtgagatcacaccggcaatgtcctcggccataggcagcagccgggcccataagatattgatacctgtcagccagcactgccaccataccgtggtgggatgcggggatatgccgcttagcgtatatatcagactggtatgtgaagaagtgcagaagtggatttaacggtgacccgtacgcaccgcgcacaggtcaccgccatcaattaaagaggggagccccttagtcagttcatgactctgcggctcccctcctgctctgtatttctttcttaatccgtaacagttcagacagcatgaactgttaccttaatctgtctcagcgattatgctgtacggccgggcgtgtagccttcttccggcttctttgtctgccaggaccctttctttcagagcttccacactggaaaacctctgctcaggacgtataaaatcggttagtctgacctcaatccacttatcataaagatcagcatccaagtcgtatatataggtttccactccaaccgggtgttttccttctattgtaggctttctgccgatatttgtaataccgttatggatatttccgtctatcactacctttgaaagatacaccccgaatgccggcagatgcttctgctctctcggttcgatattaaccgtaggaaatccgagtgtcgtacccaaatgccggccatggatgacacggccatggatcatatacgtatatcccagaagttcgtttgcctttttaatatttccccgggccagctcttcccggatataagtgctgctgatttccctgcttccgtccagcgccttgtctacaatcaccatttcatagccgtatttaccagccagacttttcagcagctccacatctccctttctctgatatccgaagcggaaatcagttcctgtcacaattgccctggccttcatctggccgcacaatatatgggaaacaaattcctccggctgcatatgggccacttcctggttaaaaggatattcaacgagataatcgactcctgctttctccaggttttccctccgctcggcatttgtcgtaatcatcgtctggagtttccctttcatcagagtcccgggagccgtctcaaaagtgaaaaccgcagttttataccctttatccctaaagcggaatacttcattcagaagtttctgatgacctctgtgaaggccgtcaaattttccaagtgtaacaaccgtcggttcttctatattaaattctctggttccggtaatataccgcatactaatctcctcccagaaaaattttctttggtttccatttgccctcatcttcggcatacagataaataccgacaaaacgacggctgctgtcatagacacggattgccgtctcctgtccgtcttttttccaaccggccgccgtcccgtcaggtacaaagctcagaggaaagaaattgccgttgtgaagcagcctgtccagttcctctccttctgagacaaactccggcaaggatgaaaacatctgatcgaccggaatgattttttccgccagccggccttcttccaccagtttttccacttcccccaggcgcaggctgtcttctatctcaaagcggtccaccctggttctgaacagcttctccatgcatccgccgcatcccagcttgccgccgatatcatggcaaagcgtccggatatatgttcctttggagcaatcgacgcgcatagtaactctgggaagatccacatcttctatctccaggccgtagatctccaccggccttgcttttctctccacttctttcccctcgcgggccagctcgtagagtttcctgccgtttaccttcagcgcggaatacatcggcggaatctgttcataatggccgataaagctcaggatggcttccctcacctgtttttcattcaggccggacgtatccctcttttggaggatcgtacctgtggtatcctgcgtatctgtttctattcccagtaacatgacggcccggtacgtctttcgcttatcagtcagcatatcgcagagctttgtgccttttccgagacatatgggaagcactccctccgcttccggatccagtgttcccgtatggcctatctttttctgttttaatataccgcgcagtttcgcaaccacatcgtggatgtgtagcccggttctttgtatatgttaattattccatggatcatttgttatcatgctctttcatctgctgttcaatatgttttgaaagattattcaggacatcataagcacttccgcttattgtacatccggctgcacggacatggccgccgccgccgaaataagaggcaattttgctcacatccacataatcgttggagcgcatgctgaccttatatacatgaggttctttctcgtaaatgaaaacggcgcactcgactccttccgtaatccggagctgatcaataataccgtccaaatcattgctgtccgccccgtaaaaatcaagatccttctgtttcagtgctgtgaaaatgcagcgtccgtccataaacaggaagctttctaaaagagcgcgtcccagtacctgattctgtacataagtcttccggtaaaaactgtcgtcgataatcttagcgctgttcaggcctttgtccaccaggtttccggcaatctccatcgttcttttggacgtattgctgtatttgaacacacctgtatcgtgaacgattcccgtgtataggcattctgcggtattcctgctgattttgctgtcttccagcaaggtataaagcacctcactgcaggagctggcagaaggaacaacatggttcttaccggcaaaccctttattcgtcacgtgatgatcaatgcagagagtcgccccggcgtcctgaaaataaggcaggaagattccaagccgttgtgcatcgctgctgtccagtgtaatacataattcataaacttttcccggctccatctccgttttaatccggtcaaaatttttcatataagaaaactttccggccggatggtctaaatacagatcaacggtgagctgcgggtaattttccgacagataattatacataccaaggcaggtgccgacacagtcgccatccggatggaggtgtcctaacaggacaacattgtttacgccgtcaagaacttcatttaataaattactcatcctctatatcatctcctgctcagcgataatccgggcgctgtgcgcacagattaccggattcaacgataacctctgcacgctccgcgcacaggtcaccgccaccaatcagacagcctccgaaattcaccggaggcttaaccatctattattcgtttgaagtgtcttccaaaagctcttcttccgaatcctcttctttagctccgctttcattcatccctgccgtcacttcgttaatcagtctcgtcatattgacgccgtactcgatcgactgatccaggatgaagctgagttccggagtatttctcaaattgattcttttggccagctgggtgcgtatgaagctggccgcactcttaagcccctgaactgtatctttgccagcctcctcgcttccgagaacactgatatacgccttgcagaatttcagatccggagtcacctccaccgatacaaccgtcgtcatgggatgaattctcggatcctttaattcacggctgataatctcgctcagctctttctgaacctcactgttaatacgtgtatttttaatgctgtttttgcgcattattcatgcctctctttccaacgatgtaaaacgtcttccgtctttcaccgccatcagtcaggcagaaggttcccttagcggggaacctctaccattgcatatgcctcgatcatgtcgtcttcctgtacatcgttgtatttctcgaatacaagaccgcactcatatccggcattgacttccttgacatcatccttgaatctcttcagggatgccagaggtccgtcaaatatctgctctccgtccctggtaatccttaccttgcagcctctctggaatttaccgtccagaatataggagccggcaattgttccgacaccggatgccttaaaggtctggcggattacagcgtggccgataatctgctcttcgaagattggatctaacatacccttcatggctgcttccacgtcttcgattgcctggtaaattacacggtagagacgcatatctactttttcacgctctgcgattgatttggccgtaacatccgggcgcacattaaaaccaataataatggcattggacgccgctgccaggctgacatctgactcattaattgtgccgacacctccgtggatgacttttacaactacctcatcatttgacagcttgacaagactctgttttactgcctctacagaaccctgaacatcggcttttacgatgatcggaagttctttgacatttccggctttgatctgtgagaacagatcgtctaatgacagcttagccttagtatcttcaattaatttattcttaccctcggaaataaatgtttccgcaaagcttcttgcttccttctcattcggcgtagcaacaaatacttctcctgccttcggcacatcgtttaatccgagaatttctaccggagtggacgggccggcttcttttacgcggcgtcccttgtcatccatcattgcacgtaccttgccatagcaggctcctgccgcaatcggatctccgacacgcagcgtgcccttctgtacaagaacagtagcaaccgggcctttacctttatcaagttcggcttcgattacaagacctcttgccgtacggttcggattagccttaagctctttgacttcggccgtcagaaggatcatctccagaagctccggaattccttccttcgtatgagcggatacaggaacgaaaatagtgctgccgccccagtcttcggataccagttcgtattcaattaactcctgcttaaccttctcaatattggcgcttggcttatcaattttgttgaccgccacaataatctcgacgccggctgcttttgcatgattaattgcctcgattgtctgaggcataacgccgtcgtccgctgcgactacaaggattgcgatatcggtcgatttcgcgcctctcatacgcatggccgtaaatgcctcatgtcccggcgtatccaggaaagtaatctgctgaccgttaatttccaccatataagcgccgatatgctgtgtaataccgcccgcctctttggccgtcacattcgtctggcggattgcatccagaagtgatgtttttccatggtcaacgtggcccataacgcagacaactggcggtctttccgccatctctgcctcgttctcgtcctcctctttaaggagttcttcgattacatctattttttcttccatttcgcagagtacatcgaattccatggcgatttcttccgcctgcccgtaatccacttcctggttgatcgttacaacttttccctgaaggaagagtttctttacaataacggacggctgaagcttcatcttcgcggccagttctttaattgtaatcacttcaggaataatgatggtcttaaccacttccaccttaggctcttctctttttggctgcggcggcagtacaggagcttttgttcccttgccctgttttgcgtggtttccgtcctcacggttcttcttatcgtatttatcactcttataagcattcttattctgcttgttgttctgctgtttctgtacaaccggcgtctcaaaggacggcttcggaatattcagtcctcttcctccctgaccgtcacggtttccctgatagcctccggttctctggccgtcacggttcccctgatagcctccggttctctggccgtcgcggttcccctgatagcctccggttctctggccgtcgcggtttccctgatagcctccggttctctggccgtcacggttcccctggtagcctccggttctctggccgtcacggttcccctgatagcctccggttctctggccgtcacggtttccctgatagcctccggtctggccgtcacggttcccctgatagcctcccggtctctggccgtcacggttcccctgatagcctcccggtctctgaccatcgcggttcccctgatagcctcccggtctctgaccatcgcggttcccctgatagcctccggtctgaccgtcacggttcccctgatagcctccggtcctctgaccgtcacggtttccctgatagcctccggtcctctggccgtcgcggttcccctgatagcctccggtcctctggccgtcacgatttccctgatagcctccggtctgaccgtcgcggtttccctgatagcctccggtcctctgaccgtcacggtttccctgatagcctccggttctctgaccgtcgcggtttccctggtaacctccggtcctctggccgtcacggtttccctggtagcctccggtcctctggccgtcgcggtttccctggtagcctccggtcctctgaccgtcacggtttccctggtaaccgccgctctggccgtcacggtttccctgatagccgctgctctgaccgtcacggtttccctggtagccgctgctctgcgctgccggagccgctgccggtgactgcggagctgctgcctgtgaagctgccggagccgttgtctggggctgcgcggctgccggctttggtgtacccggcacgctctgagcctgaaccggtctttcctgagcctggtttccggctccctgtacacggcccggctgctgaggacggctgccgccgtaactctggcctgccggacggttatttctcatctgagtactgttctgtgggcggtatactgccgcaattcttttcttcggcggttcagccggtccttctgtcctgtcagatgctgcttttgattctgcttcttttatttctgcctttactggctctttcctgatttcttccactcgcttagtttccgcctttcctgtacctggttttgaagtctccgtcaccggcgtcaccgccctttgtgatgcatgccctgcacccaatgttcttctgacaatagctgcctggtcatctgaaatgctggatgcatggcttttgacatcaaactgattcttctgtaatatttctagaacttctttattggttttacccagttcttttgataattcgttaactctcatactcactacctccgttcagctccatctgtttcacgagtgccttggaaaaacctgcatccagtaaggccagagatgcccgcatctcttttcccattgcgtgccccagttcttctttctttccgaaaaagtaaatcgggaccttgtagtaagtacacatattctggaacatctttctggtattgtccgatgcttcttccgatacaatcaccaaatgagcctttccgcttttcaccgctttctcagcagcaaactcaccgcttgcgattttgcccgcctttgttgccaggcccaaaaggttcaatatttttttactgttctccaatattgtccatctccttttcaagtgcttcatatacttcctttggaatggccattttcagagaacgctccagtcctttattcttcaccgcttttttatagcagtccttagatggacagatataggcgccgcggccgtttttcctgcctgtggcatcaattataatctgatcatcggttgttttcagtacccggagcatttctttcttattcttcatctctccgcacccgatgcactgtctctgcggtattttttttgtactcaacgtttctcacttcccaatcttctttttctttaatgacgcccgtcaaatcttactgctcctggtagttttcctccccgaggccttcctctgcctcatttgctgcaaaatccacatccccgaaagctgccgtgccgtcttcctctgcgtgattctcatccgcaccggcttcttcgctgaaactgtcaaagggttcctcggcatatccctcaaagccctgctcatatcccagctccaagtcatccagaagtccggattctcttgcctgtgtctcactcttaatatcaatcttgtacccggtcagcctggctgccagtctcgcattctgtccttctttaccaatcgccagtgaaagctggtagtcaggtacaattacctgtgcttccctcgcgtcctcatcggccgcgacaaagataacctttgccggactcagggcattctcaatcaggtaagccggattctcatcccagttgatgatatcaatcttctcaccgcgaagctcactgacgattgcattcaccctggctccgttcagtcctacacaggctcctaccggatccacatccgggttgttggaatacactgcaatcttagttctggaacctgcctcccgggcaatcgctttgatctcgacagttccgtccttgacctcagccacttccgattcaaaaagtcgttttaccaaatcaggatgcgttctcgaaacggtgatcctcggtcctttattggtatcctttacttccagaacatacagtttgatacgctctgtcggtttgaatacctcaccttttacctgctcgctttcatttaaaatcgcatctatctttccgaggtcgatacagatattacggtttacatagcgctgtacaattcctgtgacaacatccttttctttgcagtaccagtcattgaacagggcctttctttcttcttcacggattttctggagaatcacgttcttggcattctgtgtagcaattcgtccgaactctttggagttaatctgtacatggacgatgtcgcccagatcgtatctgccgttcatcatctttgcttcagcaagactgatttgcagcatcggatcttccacgctctcaacgacttctttctcggcataaacggaaaaatcaccggtttccctgttgatcgtaacctttacattatctgcctttccaaagtggtttttgcaggctgtcagtaaagaattttcaattgcctccagaagaatatctttgctgatattattttccttctccagcacgtttaacgcttcaatcaactctttattcattttcttttatcctcctaccgtctaaaaatcaaaggccagacgtattaaagcaatatctgcttttgcaaatatcagatcattgccgtcttctaatgtaattgtaaccgtatctgcatcataggacttcagcgcccccgtatattccttctgcttgttaagaggcttgtaaagccttacctccacatccttgcccatgctcctgacgaagtctttttccttcttaagcggcctgccaagtccggggagctaacctccagaatatagctgtcatctataaagtcttccttatcaagccattcaccgagttttctgctgataatctcacagtcgtcaacggcgataccgccctctttgtcaatataagcacgcagataccatactccgacctccctgacatattccacgtccaccagttcaaaatggtgttcctctaaaaccggaaggagccatgcctctacttttgcttcgtactgttctctttttgtcatatctacaccacctttttaagcaggtaactgactttttatctccacacatatcttttccctcagcattgaaaaccgggctttgcacaaagtgaaagagtggacatccgtccactctttctagtcagtctattatgttatcttgtttagtataacacctttttcaataaagtgcaaggttttcttttttaataggaagaaatcgctcatctgccgtaacagttcagacaggtcgctgttactaaaatatatggagatttaactgaggtgtggaggacgcgtccggaacggaccatgtccggtgtggtgagggggatggctgagtcttccgtccccgtgggaagttggttgtggagggggaatccggccggaatgaattgctgcggggaccgtttgcactctttggagtgcgcatcggagtgctaagctcgtgaaggacctcgctaagcaccggcggactcccatgtcccctccgcaattgattccgcctacttccccgggtcagtttttcgccggggacggaacactcaggcggaggttttcaacaccggatatggtccgttccggccgctgattgtctctaaccttaaatggggagggccctgtcgcggccactacgtgtttacggcaggccgatatcaaaatcttccgcaattttttttaaagtccattgaaggcatatcgtatttcccgtacacggtagcactgagtggccgcgacaaggtccgcccccgcacttaacgcgtgagacactcagcggccgcaggccagcggacggggccgatacacccggcggagtctttcgttccggcgaaaaccttccgggagaaggagatactgccgacatcttccggcggagaaggagagaatgatatccggaaggacgttcgcccgagagatgatagctcttaggcagagggagacaaagcgcgccgggcggattttagccctacaagggcaaaatccgggacaacttgagcttcgaactcattcggagttcggagcgaatttgtccgtaaccccgggggctttgccttcctctgtcttagagctatccctcgaagaagcagtccagccggatatcattctctccggctccgccctgcgaaaacaaaaccacagtatctccttctccatccagcgatgccaaacccccgggacgaaagactcatatacacatcccaccaccccgtccgctggccgtaccggcggcgaccggctcagcccccatatccgttaaaccaggccctctcttcaaaagccatcttctttggagccggaaccgtggaatccggtattccaatcggaaggtagactgccacatttaaatcctccggcacacccagaagctgtgccatctttctgtcctcaccattgtgatggagctgtccttcgatccaggttgtcgcatatccctttgccgtagccgcaatcagaatattttcggccgcagcagcaaaatcctgaatataataggtctcgccgctgggagcaattactttctttgtcagcaaaagaattgccgcgggagctgtcgccgcccactcatgcccgtaaatctccgccagtttttttaccagctccgggtcgtccactgcgataaatttggtcgtctgaagattgcagcccgacggcgccaggaaaccggcttccacaatctccctcaaatcctcccgcgggatcggttccgttttaaacgtgctcctataactttttctgccttttatagcctgtaatgcatccattcttattcccctttctattgactatgattttttgtcctccacatcatacaaatctgttctcctgttttccagggaaggaatctgttttctgatttgatccagatagtccagatcgatctccgcatatgtgatcccaggtacatcctttgcccgtgctattacggtcccccacggatctgcgacaaggctgttgccataagccacataagccggtttctttccaatctgccccggcgccacaatgtagcagccgttctcgatggctctggcccgaagcagcggttcccagtgatctttcccggtcggcatcgtaaagctggcaggaacaaaaatcacctgcgccccttttaatgtcatcagacggtacatctccggaaaacgcacatcataacagatcgacattccaaaaacgccaagctccgtctccaccgtcacaatcttttcccccggccggactttatccgattcattaaacggtgtaccgtccgcaagcgtgatgtcaaacatatggagtttgctgtaggacgccagtatttttccttccggtgaaatcagaacgctggtattggccgagcgcttttcgccgggcagctcctcggtaatgctccctccatggatataaattccatgctcctttgctttcctgcataagatatctgtcgtataccccggaatctgctccctgccgccgccttctcccacatttcggccaatcaggttcatgacttccggaaagcagacaagcttaacgcctcgtaaggccgcctcgtcaatccaggccgacgcctgttccaggttgatgcccttatcattctgtgtgtccatctgtatcattgccaacatgtattttctaatcaatcttctctctcctttactttaacaaggctcctcttccagatgcctgatttgatgtataaataaccgaacggcaccgaggaaaacggtgctattgcgcatgcgatatagatcccctccagccccatattttttcaaacgtaattgccaggattaccctgaatataatgcagtttgtaaaactggacatcattgcaaaagtcgaatgtccggccccgatcatcatggaatggtatatcatgaagatcgcatagaatatctggccgataatctcaatcctcatattcagcaccgcgcctgcgattaccgtccggtcgtcggtaaaaatagcagccagccacggtccggcaaactccactatcactatcgtagccaaactcaccacaacagccatcttcattgccgtatacatgacttctttggccctgtcgtagagtccggcgccaaggttctgggcgattacggaaacagctccagtagacatggcgctgattaacagctggcagaggtctttaattttaattgcaactccattgcccgctgagacatccgtcccgtaacggttgatcagaaatgtcacaaggagccaggaaaaaccggctatggtcatctgcaccgcgctgggaattccgactttcagcgtctgtttcagcatccccattctaatgcgcaaaaattcccttgtaaagcggattaattctttttctttcatgattgcggccaggctgagcaaggcgctcagcacctgggcgatcacagttgcccaggcagctccggctactcccattccgaaccctgcaacgaatacaagatccaggactgcattgagtatggtggtggcaatcacgatacgcatcggcgtcctgctgtctccgacggcgcgcagcatggatgaaaatgcattgtatatgtaaacaaaaaacattccggccgaacagattctcagatacagcaccgcctcatcataagcaggggcttgaagtatccttaagattcctccggatgatgcagccagtattacggaaaaagcaatgcccaggactgccgataaagacacaagggtaccggctgcctcctccctgctcctatcttctttccccccgtaaaactgggcgatcagcacacatccccctgtggtgatgccaatggcaatcttcgtaataataacaagaatctggctcgaattattgatcgccgaaattgcggacgggcctgcaaagcggcccgctatcaccatatccaccatattataaagagcctgaagaagactggaggcgattaacggcagtgtaaaagccactatctgtttaacaatgtttccctgggtgaaatcctgctttctgcctgtcttatcttcaggcccgccgcttttaaaggacggctctgtcttctcactgtccctgtttatcttagtccccgccatactctgcctcatttcccggttccggctaatatattcacaggaaatccctgcgcttccgataaaatcgaccggtctttctttctgatcattattttactacagacaggcagagacggcaatcaaaaatcattgcaattcattcccctaaagctcacgtccctgacaaattttcatatcttaaactaaagccagtatgttttagaggtgttatatgactgcgaaactggaagtttcaggcctcagttattcctaccattccatggacggggagactcaggccctttctaatatatcgtttaccgtagacactggagaattcattgcgattgtcgggccgtccggctgcggcaagtcaactctgctctccattttcagcgggctgttaaaaccggacgaaggagaaatcctgattgacggcattcccctccccgacagcaaagtcaatatcggttacatgctccaaaaggatcacctgttcgaatggcggtcaatcctttccaacgcagctctcggactggaaattcagcacaagatggatgaacgccataaaaacgacctgagggagctgatgaattcctatggactgggtaattttgagaattcccgcccctccgagctctccggcggaatgcgccagcgtgccgcccttatcaggacattggctctggagccggatatccttctcctcgatgagcctttttctgcactggattatcagacacgcctatccgtatgcgatgatatcagcacaatcatcagaggccgccataaaactgccattctgattacccacgatctgtcggaggccgtcagtgtggcggatcggattatcattctttcaaagaggccgggaaggatcaaaggaatactgcccatcccattttccgcaccgggtttaagccctcttgaaaggagaaatgatcctgaattttcaggttattttaatgaagtctggaagatcctgcaaaactaaaacactccatggttgacagcgccggatcgcgccgtttaccgggcgggtgcatctttgcggcccattagggctcagccctgtaaagccgcctactctttatccttatcaggaggtgtctcatggaattacatgaaaccctggcccagcaggcatttattgcaaggcagaaacgccgccgcagaatggtcacaatctgccgcattctgcttctttttattttactggcactctgggaaatctgcgccagattcgatatcattaacgactttattttcagttctccgtcccgcatcatactctgctttttaagcatggtgaaggacggcagtatttttttacacaccggtgtcacaattatggagacgcttgtgagcttcttccttgtcgtcaccatcggccttctgggcgccattctgttgtggtccagcaagagcctgtcggatatactggagccgtaccttgtcatgctcaacagtctgccaaaatctgcgctggctccgattctgattgtctggttaggcaataatatcaaaacgattattgtggctgccgtttccgtggctgtattcggggcaataatgacattgcacaacggtttcagccacacggatccggatcagatcaagctgatttattctttgggcggtaaacggaaggacgtacttaccaaagtgcttctgccgggctcaatccctctgattatcagtaatatgaaggtcaatgtgggactatgccttgtcggtgtcattatcggagaatttctggcggcgaacaaggggcttggatatcttataatttatggttcacaggtgttcaaaatggatatggtggttatgtcgattgtgatactctgtatcgtatcggcagtgctgtatcagggaattacgtttctcgaaaaaaggatgaaacgataacctgcacgctccgcgcacaggtcaccgtccgaaatgaaacagctgcggttcaaatctctgcctgaaacaggcaggactctgaaccgcagctgatactatatgttacttctccatcttgggaatcgggtgttcgtccccttcgctccggaaaaccggctcgacagggacatttttcgtcaaaagagaaactgccacgataaccacagaggaggccgccaggccgataagcactgcgttatttcccaggaaagagagctgggaaagcacggctccggtcacaatgcctgcccgggcgccccagggggtaatcctgctgttgcaccggctcatttccgtcttttctcccttccgctccttccacaccagaccgatgcagagcaaaggggccatcccggctccagccatggaataagctttggcaaacagggagataaccgaggatgcatagatagccgccagagaagatgccacgccgatgataacggttgcaatcttcgcatccttcaccagatcacgatcggagctgcggctgaacggacggaccagatcattgacaaccagaaccgccgctgaattcaggcaggaatccgccgaggacatgcctgcgcagagaatcaaggtgaagattcctgcggcgataagcggcggcgtgcagtgcatcatgaaccaaggcattgcatttccgctgctcagatcctgattcattgtcataataatcaaaccaaccagtgctgtcatcattgtcataaccacacagataatcccgctgtacagcaggccgttacgggcggttttggcattcttgcaggcatagcagcgctgccagtatgtctgggctaccaaaacgccgatgagaccggtcagaaacttgttgacactgcccatcaaatccacattggcaaagctccacagttcgccctttcctacctccgccagacggcttcccagtacggccaggctgaaatccaccttgctgaaggcaaacaggtagaacacggttccgaaaacaaggcagataattccttgaaacaagtcggtccacactacgctgtagacaccgcccatgaccgtatagacaataaaaataacagaaaacaaaaaaatgattggaattgggttggcattggtaaagacctggaacagttctccgaacgcctttccctgaccgcctacccatgcgatcatgatgcaggcgcccaggattccgcagagagccctggtaaatttgtcgcggacgataagatcatcaatcatctccggcatcgtattataagtaaaatgtcctgctaaaccggcgaaaaccagggcaaaaataatcttggagccctgctcgcccaggataaaagccagccagccgattccctgctcatatccgcttccggcatggccgataaaattgccggctcccataatcgtggcaaactgggtgaagaaaatcagaatcataggaaaggaactgccgccaatggcatactgcgaaaagctttcattcgcctgatccttcacctttatagaaataataagaaaaacaccgcaaattataaccgtcaaaatccaaaatatcgtacccatactcatactgcaatccctccgtttctatttgtacttgtcaactttaccttctcctttctttatgggataatggtgcaggtaagattcccgtatgtgagattctcagcccgcgtcaggccgcttaagcgttactgctcctttacgacaaaatacggccctcccggagatctttttgccagatcgaaaatcccgcagggatctccaatttaacaaaaaaagctgtccatcaataaaatgggcagcgaaggcatcaaattatgaaactgagccttcctccgcttacgagattagctgtcgggttagggaaaggaagttcccgcatgcggcccagccgcaattacaccccaaataatggttctcccgttgctgttaccagcattcagcgcattgcatataatacaagttgctataataattgtataggaatttttttcaaatgtaaagaaaaaaatcccggcctctggttgagaggccgggttctggttactgttcacacctcgccagacagctccggataataccctgccggtattagttaatacccgatagccgccgcaattaccgtcatcaggagggcggccagccattcggctcccacaattttccaggcaaatttcagccagtttttatattgcagtctggacgcggccagataggtaatcattgaggtgtaggtgggaatcaggcagttgctgatcccgtcgccgcactgaaaagcaaatacggcagtctgccgggacaccccaagcaagtccgaaagaggtactacaatcggcatagttactgccgcttgggcggagcctgacggaactcccagattaatgatagtctgtaccaccatcattccggccgacgtaatcattcctggcagcacttccagcggttttgccagataatacaccacggtgtcaataatgaccccatcggcaagaataaccgatatcgcctttgcaaaaccgactgccacggctccgcttaccatgtctttcatgccgtccacgaaatatccggcccattggttgagcgaatagccatagatagcaccagtcaccaccgcaatccagaagaagacggccgaaaactggccaaaccaccatccctgtgaactggcgccccagattaagaatccaaagccaatgacgaaagcggccagtcccatgtattccttactggttgctttagccgaaagatccagctctgtgtgccacgattccgtattgccggttccatataccacactgcgcgtgggatctttttttacgcggaccgcataccttgtgattccgatgctcgatacaaccagcagtaccgccaaaagaatccacctgtaccaactgccggaaaaagcgtccagctctgcaatggactgagctaccccaacgttgaaaggattaaaaattccggcagtatatccggcgttacctccgataaatacaattgccattccgaccagggcatcatatcccagagcaacacagagcgtaattactgcgggcacaaaagcaaccccctctacagtcatgccaaaggtgaatccgcctactgccatgattgccatcagcagcgggataataatcttttctttcccctgacgcgtctggccaatgaattctgaataaagaaattgatggctccggcttttgtaatgatccccatacagccgcccataataagcatgaaaccaataatttctgcgccgtctataaatcccttgtgaatctctaccggcagattaagtattgaaatagagtgatcctcctctacctcatgaaaggtacctgccactactactgtccgcccattcctctcttcacggtcatactgaccggccggcagcacaattgttaaaattaccgccaaaaggcatagtccaatcagaataatataagtatccgggaattccatgcgccgtctttttctcaaagattttgtctccttaccactcataagtctcccccttcctaacagatcgtttatcccggttttcatttaaactacagtttagctttaccagatttcgtattcgtcagccttaaagcgcagctcctctctgaatttcggatgagccacctgtatcagactgtctaccctctcatcgatactttttcccttcatcttcgctactccgtattctgtcacaatataatctatatcatttctggtaattgtcaccactccgcccggatacagtgtcggctggattgtggatacggtaccgttctttgctgtagacttcacggcaataatagattttcctccttttgaatgacttgctccaatggcaaagtccgcagctcctccgggtcctgaaaactgtcttgttcccaatgattctgaacagatttgtcctgtcaaatcaatctgcaggcaggtattgatagacgtcatcttttcattcttggcaatgataaacggattattaacgtaactggcgctcctcagcgaaatctggggatttccgtccagaaaatcatagagccgctgcgaccccagtgcaaaggcgccgacaataagttctctgtgcaatgtctttcttcggcctgtaatcacaccggcctcagccagctcggcaataatgctggtaatcatctcagtatgtactcccagatcttttttccccgccagatagctgcccaccgcattggggattttcccgattcccaactggattgttgctccatccggtaccagttctgccacatactgcccgatctgcatttctgtttccgatggaatcgtgtcttctatcgtaatcaccggctcgtccatctctacaatataatcaatatcccggatatgaaccagattttccccgctcaccatcggcagattcctgtcaatctgcagcactacaatgtcagcagaacggattgcatccatctcatagaccaaattcaaaggaacacgtacaaatccgtttttatccatcggtgctgccaggccgtaatacatgttaatatgatggtcttccagtactcgctccgtattgttatgcatattaccaggcaccagactcgccagccggcaggtatggtgactgcggcagaaagagtcataaaatgtggtaagcgctttaaaatgccccttcatgtcctctctgcccgcaaaaggataatcgtaccaaagacctccgtggcgcagtgtcacattctccacacggtctttaattgtatgtaagttcctgagaaatcccaccggttccaacgcattatatgaaatgcagataaaatcaccggtccggatcatatcgtagatttgagtgagctccactttttttagctcatattctctctcatactgattcataaagaagttcctttctcctggaaaccgctgttatcttccaaaaaataccggccgccttttttctctgaaagcacaacccgcttctttgaaatcttccgtttttttatgttcccggttcagcccggaagaataatccacgttttcccccagttcgttcggatcataaatctttagcagcacctttcgcacacagcgcagtcccagaggatcgtgctttgctatatcgcgtgcaactgaaagtgtctcctccgccagcctgtcctccggcacaaccttacagaccatattatattggtgcatctgttcagccgtcagaagatttcccgtcagcgccatataacgcacgaccttcggcggcaggcagtagccggcctccggagcgcctcctataacccccacattcaactcagtgattccgaatttccccttctcgctggctactacaacatcagaaactgccgccaggcaaaatcctgtccccacgcaggctccgttcacagaacataccaccggaatttcagagaataacactgcattacctgcttcatccacaatcgacgaataattgggattttgatatacagcatcatctgaaaatatgctgatatcatttccggcagagaacatctttcctttggcattcagaatgatacagcggtaccggttctccggagcattcgcatactcaaacgcaagcttgacttcatgatacatctgcggattaaaagcattaaccggagggcggttaagggtaattgcaacaattgcttcctcaggaattgaaatttgaataaattccagctccggcatatttgtcatctcattcactcctcccttatcacttgaaaaagttactcccttttccaattcaacattttcaggtccggccggctatcacaaatttgtaagttaataatatcaaaacttttttattattagaaatgaatagaatttataagccttataattaaatattatcgccattttcattgttttgtcgtgatttttcattgaatttattatatgataatagataataccacagtaactgtcgttaaccggaatgaatgggggattcagatatggagatgagacagttgaaatattttattgagatcgtcaattctaagagcttttccaaagctgccaccacactctacacaacacagcctgcgctgactaaatcaataaagctgctggaagatgaactggggtttaagctgattgacagaagtaccagctatttcaaattaaccgacaagggagcactcttttatcagcatgcccgggatgtctacaaccgttttcaggatctctacggaatcgcaaaagattcctcctcctttgcctgtggtacggtaaatatcggtactatggtcgtcgccagtacttttttccgggatctgatacggcattttgcagttaattaccccggcgtttccgtcaatatcagggaaaagccctccatggaaatcctaaatgacatacaggccagccactgtgatatcggctttgttcttctgcctgccggaaatctcaatggctgccaggcccatgtcataaccaaggaaccaatgcagattgttatgtgcggggatgatcctctgtcggaaaaggatgtgatacttgtagatgacctcaaaaacagggggctgatattgttcagtgatgattatcagccgcatcttgatatcatgaatttatgtctgcgtgacggattctcaccaaatgtcatcaatacggctccccggattcatttgctgatatatatgctgaaactgcgcagaggactgactttcctgcccagttcctatgtaaatgaatatgtaaaaaaagattatccagaactgattgttaagccattccgccataatattaccagggagatggctgtaatatacagccgggagcgttatttgtcctgcgctgtaaaagaagctgtgcgttttacactggactacttcagtaacgcagaaaacgaattagtccggaggaaaccggactaattcgttttctgcttattctaaattagaatgcctgttcttaagctgttcaaaatcaatattcatccgccgggccagctccagggtaatgcagtcggtgagcagcagaagctgctgttcaaaaaggctgcccatcggctgaaccgaaatccggccatcctgaaatttgctctgggcgcggatcacgcaggagaatttcgcctctctggccaaagcggattccctgttgcaggtaaacacaaccgttttcatccccagctgtttggctttttccatatacacacgcagcgtttttgtttctccggatccgcttccaatcaacagcagatctcccgccttcgcggctatcatttccgtatccccaattacgtatgcacagaaacccaggtggattagacgcatggcaaaacagcgcataatatagcccgtccgcccggcgccggctataaagatctttccggaatgcatgatactttcaataatcggagcatcgttcgtctcgtcatagccgtcacaggcctcctgaagctctttgacaatcacctttaaatgttctttcagcaccggcgtcccccctttcatatagaatattgcccgcagcctgcagacggctgatcacgcggtccggttccgggtgccggaacagataccgtccaatcacggcccggctggctccgcactttatacaccgctccgccttttccagatccagaccgccgtctacgccgatataacactccggcctgtccctcagcatacccttgatttccctgatcctgctgtaggtgtcttccagaaaaccggcattctgaacccccggctggcagctcatcaccaatatcccgtcaatctcttccagataaggctcaagtttttcaattgatgtgcggggggaaatggccagaccacaggaaatccctcttttcctcatgagcttaaacacggtctgcaggccggatccgggtccgctctcaacatggaccgcagccgatactacccggcttaagtcaagccgctccaaaatccttgcggattctcccgacatgatatgtaaatcaagaggcagggtactggcagctccgatttgctgtatccatatattgttaaagccaaacagcggtacaaattccccgtccattatatctatgtgcaggccgtcggcgcctgctgccgtaatccgcctgatatccgctcccaatcgtaaacagtcggcagaaaatacggaagcaaatattttactcactgtcattccccctcggccagccgttttcccaccccgcccccgggatggattctgtaaaaatgctcttttgtgaactgcttttcctccatcagactgatgctgactgcgtcaaatacagcaattaccgccagcgttgacgctgttgccagcatattgaaccggtccggttcttctttaacctttattcttaaaatgaggtcgcagctcttcgcatattccccctcctcattttcagtaaccataataactctggcgcccgaccggcgggcgggcagaatcatctcattgatttctttcgtatatccgccttttgatagcagtaacagcacatcctgctccccgattacacccagtccgccgtgaagcgcgtctgagggcgggataaaaaatgcagggcagccgacacagcataaggtatgggcaatcttcctggccgcctgggcggaggtcccgcaagcgcttaaaaccaccttgccccggcagttttttatcgtctctgtgactgcatccacctgggcttcatccagtgaaaatacgagctcccggattgcctcggcttcccggttcaatacattactaatcaattccctcatatcgcatctccggcattctttaatggtttttctggccataatatgcgccaggaccaaattttctgttctgatgagtctctaaaagttccttctgcaccctgccgcactgtccgccggtcatcgtgtagttcatataggccatatttgccacataatctaatacctggctgtttaagacagccgcggaaggtgaagtcccccatacaaacggcccatggctgcggaccagcacagcgttcatacggaccggatcgagggcttccattctctccaggataacctttcccgtgtttctctcgtaatctgttccaatctcttccccggtcatcagcctggtacaaggaatatcgccgttaaaatagtcgcagtgggtggttccgtaaacaggaatatcttggccgagctgcgcccacattgtggcattcagggaatgagtgtgtacaatcccgcggatccccttgtccttccaggctctatagagttcaatatgggtccaggtgtctgtggacggcgaatatggactgtcaattacatttccatccaggtctacggttaccatatgctccttcgtcattttgtcatatggtacgccgctggctttgattaccataaccccgtctccccgtcgtaaccggacacatttccccaagtggatatgacgaggttttttgtaacaagatccaggtttgctgccaggacctcttcctttaatgtctcgatgctcatgcgtatcttcctctctcatttgttttctacgttaatgttcacacggttatgtcccgcgaggtgttttcgtgcattttttgcacgaaaatcccgagttacacggcgcgaaactgtgtttttgcagtttctgtgcatcgcgaagcgggttattgtttacaccatgccgcttttggcatggtgggaacagtaacctttcttctgctccaccgacaacgtcttcagtgttttcatcaccgggttcgcgcctcggccaaagtagtcgtgcaggcgcccgtattcctgatacaggatgtcataaaccggttttgccgtttcatccggctcataggtcctgacgatgggagccgccatatggccgaccgcttcctccagggagctgtaaccgccgtttgcttctccggccgcatacgcagcccagatagcggaggacaaagccgcattctgccgtgagcctgcaatccgtatcggcttacccaggacatctgcataaatctgcataataaacgggttttttctggctattcctccggaaataatcacctcatcgattgcaattccgcatgccgtatagttttctatgatttttctcgtcccgtatgcggtcgcctccacaagcgcccgatagatatcttcgggccttgttttaagcgtcattcccaccagaactccggtcaagtccccatccaccaggattgagcggttcccgttccaccagtctaaagcaatcagccccgtctccccgggcagcttcccggcagcttttccgcttaaatacgtatttaaatctaatcccgatgtctccgcctccctgcaatacacttcaggaacgcagtgcttaatcagccattcaaaatgatctccgacgcagctctgccctgcctcatacccgatataaccgggaataacacagtcgtgattatatccgcataccccgggcacataaagctcctgctccgccagcagctcatgacagcttgaagtccccatcataatcagcattcttcccggcgtgattacaccggctccgacactggctccggccgcatccagatggccggcggctacaatcgttccctccttaaggccggtcagtgcagcggcctcccgggttacccggcccgcacaggagccgatcgtgattatctcccctttcagtttctcagacacaacgtgttccattcccggcatcagctctttaaaaaaatcctccggcggatagccgtcacgcgaattccagatagccttaaatccaagggaggaggtattcctcgtcatcctgccggtcagaagcatcacgatccagtcggctgcttccatgaatgaaccggtttcaccgtacagttcgggcgcatcacaaaaggtctccataattttcggaaacatccattcgctggaaatttttcctccgtacctctttaaaaagtcttccccgcgctgcttagccacttcatttatcctgtcggcatatttttgtgccgagtgatgcttccacaattttacataggcattcggctcatcacgatagcgctccgtccggcacagaggcgttccgtcctcctttacaggcagcatcgtacaggaggtaaaatccaccccggccgcacagatctcctccggccggatccggcctttctctatcacctcccggattgtcgtttgcagcgcctccacataatcctgcggttcctgcagcgcaaagcctccgggcggcagcgctttgcctgacggcagcttctcatccatcacaccgtgccggtacccgcataccgatacggcagtttcttttccatcagcgacattgaccagcacgcatctcgccgacaaggttccgaaatcaattccgattgtgtattttcccataattatcacccttttatttctctgccgaagttacatttctcatcctggctgaaaactctgagaatgtgacagccgcaatcagaaccagtcctttaatcagctgctgtacatagtcattgattcccagcataatcatcccggtcgataacactcccattatgagtacgccaatcataacctgggacactctcccctggcccccgctcaggcttacgccgccaagcaccacggccgtgatggcgtccatctcatacccgattccggcagacggctggccgctgtttgttcttgacagcagcacaagaccggccactcccgcaagcatgccgctgattgcgtaggcagacagctttgtcttgattacactgattcctgataagaacgacgcctcttcattaccgcctgtcccatatatgtaccggccgaaattgcactgatccagaacgaactttccaatgagaaaaataactgccatcaaaatgaccatcaggggaatccgtgcaaccgaggtctttgcaaaatctccgaataccgcgctgaaaccaaacaccggcaggcctcctgttataatataggcggctcccctcaacgcggtctgcgttcccaacgtcgcgattaacgggggcatattcagcttagtgacacagagtccattcaaaattccgtaaatcagggcgataagcaccgtcagaatacaggttaaggggatactgaatccattcagcataaagatggccgccgtaacactggacacaccggcgattgaaccgaccgacagatcgattccccctgtcagaatcacgaatgtcatgccaacagatataatccctgtgatggaaacctgcttcaaaatcgtcatcaccgtattgacagataaaaagtttgaagactgagtggcaaaaataataatcagaagcagcaatactactgcgatcccgtattccaaaagaaggttgactatttgcttattctttttcatttgctgtttcctccgcatttaatcccagtccgatgccatttccaaaatatgttcctgggtaaaatccccctgccgatttcgcctttcagtctgccgtcggccattaccagaatccggtccgacattccaatcagttccggcatttctgaacttatcatgataacggctttgccctgatccgtcatttcacggatcagatggtaaatctcctgttttgcgccgacgtcgattcctcttgtcggttcgtcaaaaataaggattttgcagttggtagccagcattttggccagcaccaccttctgctggtttccgcccgaaagattcttgaccagctggttcatcccgggcgtcttaatatttaagtcttttatgtaccggtgcacggtgcgttcttcctctttcttattaataacgccaaagtcagaacacctgcgcaggatactgagtgcggagttttcttttaccgttgcatctaagataagtccctgctttttcctgtcctcgggaatcagtccgattccatgttccagggctgtcctgggtgatttaggaacgaagcgcttcccatccagcagaaattctcccgacagaaccggatcagcgccgtaaaccgcccttgcaagctccgtccgcccggccccgaccaggccgccgatgcccagaacctctccctctctcagttcaaacgagacgtcatgcacacgttttcccgttatatgtcttgcctccagcacgacgtttccggttttcccgtttcctgccggataatcgtccgccagttcccggcccaccatatatgaaatcaactgctttttcgttacctctcccgtctctttggtagtcacaaacctgccgtcacaaaaaacggtcacacgctcacataaatcaaagacctccgtcagcctgtgggatataaagataatcgtcacctttttttctttcagtttccggataattctgaagaatatttccgtctccttcaaggtcaggggagcggtcggttcatccataatgatgaattttgcattcttcgatacggctttcagaatttccactatctgctgatatgcaactcccagcccgcataccttcgcttttacatcgatatctactcccatctccctgcagaacttttccgcctccagattcatctgcctgacagaacgcacgcccattttagaaatttcccgaccgtaaaaaatgttttccgccaccgtcagatacggcacaagactgaactcctgatagatcacggcaatgccgagtttcatcgccagagagggggttaatctgtcataaacctgattttcaaactcgatagtgcctgaagagggtgggatcgcaccggtcagcaatttgataaatgtcgatttccccgcgccgttttctccgcagagcgcatgggtttctccccttctgatttccatggatatattatcgagagctttcacctgggcataatattttgacaaaccgataacctttaaaattacatctcccacattttctcctcctgtcatctagtccggtagtgtatccggccatttgcaatgccgtaccgggtttaagccaggacaaggcatactgcgagtatgccttgtcctctttacaatcactgcactgctttaaatgttccgtccagaacatcctgcttcggtaccggtttataattcagcatttcaatctgctgctcggccggaattccctctgtggcatatttatataatatcttcgcgcagttatatccgcccacatacggctccagatccacggtgccgcggtagatgctgtcttcctggcctatgtattcgatggcctctgccgttgcatcgccggaaaataccgccttatcttcaccggtcatgcctgcattaaccatagcctggtagccgccgattgcgccggagtcattcgtgcccaccacaacatttaaatcaggcgtctgcgccagtacggattccacaattttcataccgccttccagtgtatcgcctgcctgtctggcaacgatctccacatccggacagatttcctttaaagcgtcctccacgccgtcgccccttgcaatgacagactccacattatcctgggaaatgattgccaccttggctttaccgcctaagttgtctttaatccactgtccggcctgtgtaccgatggtgtggccgtaatcatattccttcattccataaatcaggtttacattatcctgctgctgggcaatcgtagcggtggctactccctgagctttggcctgttccacgatatcccacgttgcattcggatcgattggggtaaatacaaagccgctgtatttgtcatttaccaagctctccagtgatgctacctgcttgtctaccttatattccgaatcaatagaaatatattcacagcccagttcctcacaggctgcctcaaatccctttttaacagtggcattccacggattagccaggttcatgctgacgtatgccagcttcaccgacttgggatccacggttttagccgcttcctccgtcttttcagcggcagattccgccccggctgtctccgatgccgtctccgcaggcgctgactgtgtctctttctttccctctgtctggcatcctgccaggccggccgccaataaaatacttaatcctactcccaataatctttttttcatgatatcctcctgtattttgcctctgtcatgctgcatccgatgaactgttacattttattgcagtcaatcgcgttctgcacttttttcagatatttgctggtgttctgtccgcatttcgtaatatatcccaggtacagggcatccaggattgcctgatcggaaaccctccttgtcaccttgtcccttccaatggttaaatcactgatcgatgtaaataaattaatatccgtatatttcagcatcggtgatttattcatcttggtaatacagatggttacggctcccatctcttttgcaattcgcattgcatccacgatatttcttgaacgtccctcgtaggatactgcaaacgccacatctccctgtttcatgttggccgccgctatcagttgcagcatcacatcgctgtgcgcgctgccggacacccccagccggttgaacttcatgaaagccagctggcatacagaaaatgcatcgcccgttccgaaaaaatgaatcgactttgctttcagcagcgcgtccagggctttatcgtagttatcagttgccagcgacagagtatcattaagcgtctgaatattactctggaaaacttttttcaatatagttctcatatcgtcctgattttcaattttctcagactgtacttcccctccctctccgactgctttcatgaaagcatgctttaattccgtataaccattaaagcccattctcctgcagaagcgtatgatcgatgcctcactactcccagtctctctcgccattcccgccagcgtcatatcgattattgcctcgggattttccagcagttcctcggctacaatcttttcagctcttggcagagacggcagttgaaatttgatgcgcaccaataaatcgttcatagtcccccttcatttttaactatagtttttgaagtaattctatgttttcattatatagtcgcttcaatatgaagtaaatattcggtatgtttttcatcgttttacctgtttttttacctataaaatggaaatttcgttatattttttatgtattttacacaacaagggtgttatttcacttcatttctgaaatttatttttggaggaatacttcactttcctattacaacagcggatttttctaacggccagacaggtctgcgcaaaaaaccgcagccctgtcgttaaacagtgctgcggccggtaacacattatctcccccaccagttattttcctgacttcccccactctgggtgccctgctgcgccggtcttgtctcccacgacggcttggactcctgcgtcggttttggctcccacggcggtttgctctcctgcgtcggttttggctcccacggcggcttgctctcctgtgtcggtttcgtctcccatgacggcttgctctcctgtgtcggttttggctcccacggcggtttactctcctgtgtcggtttcgtctcccacggcggccggctctcctgtgtcggtttcgtctcccatgacggtctgctgggctgcggctgtgtcggccggctctcccatgacggccagctctcccaccaggaagtcgattcacgctctactgaaccttccgtctccttctgttctcctccctctgtccccgggggaagaataacggagcttaaatcaccatgcagtccgcaccggggcggcagggtatactgggagtcatccgttgctccctctccaaacggaacgacaaggaatacgccttcagcggtctccggacaaaattctgttgcagcctgtcctgattccgtacagatttctgttttgacatgccggtcgcagagcagggtcggctccgtgcctgcttcaaaatattccgtgtatacggcatttcccctcggctcgttcgtacatacgcccggtatcgcgagtttacccgatttgcggcaaatctgtacttttactatgccgtccggtacgggaaaccccggatcgggcagtccctcatggacgcgctccatgattttcttccatatatccttgtgataggagcttcctccgctgatcggctggcttgcgtcgttcccactccagatacctgctgtgtaatagggggtaaagcctgtaaaccacaaatccttactggccgtcgtagtcccgctttttcccgccgtcgtcatgccgggcaccctggcccgcccgccggttggacttaccttgacagatgcaaactttgctccgccggatacggcttccctcagggcgtcggtcagcagaaaagccgtctgcggtttcagggcctgatggcgttccggtacgttctcaatcagaaccttgccgtcatgatccacaattttcgtaaaaaagacgggttttgtatacactccccccgctgcgatagcggcataggcgccggtcagctccagattagacaccccggacgtgattccgccaagggctgtggacgcattgtaatctttatccgacatggttgtgattcccattttttcggcgtactgaacgcccagttccggtgaaatcgtctccatcatgcatcggaccgccacgatattcatggaatacacaataccttccctgatattggaatatcccaaaaacttgctgtaccagttccgaaaggacttttttcccacggaatagggggcatcatagtacgttgtggcaagcgtcgctcccatgctgtccagagccggtgcaaaggaggctatcaccttaaatgtagacccaggctggcgcagggtattggtcgcgcggttcaaagttctgctggccgtcttttctccgcgccctccgctgatcgccttcacctcaccggtccgctgatccatcagcacaaaagacacctgcggctgtatcaccgtctgtaagctctccccggctatctcatccccttgcgcaatatacttcgctttgaaacggtccacatcggcctgtacttcttccgcatttgcatacaggccgttataattgtctttcagctcctcgttgtggtattttcggatatcctgctctgaataatgactcatactgccgtctgaatggcggatggataagcggtagtccgccgacaggtatgcggccttgtaattttcaggattattgatttcctcgtctactatcgcctgtatgcgtgcatcctgtgtcgtataaatggaaagaccgccgccatataacattttccgcgctatggcctcggaatatcccagacgatccatcagggcttccgtcacctgctcaatgacttcatcggtaaaatagctgtacggcgtggccgatgccctggccgtcacatccacattctggattctgtcatagacgtcatcggccagggcctcctccttctcttcctccgtaatcattccctgctcctgcatttttccgagaatgattttccgccgcttttcattttctccggctccggtcagcgggttcagttttgacgggtttttcgtgattccggccagtacggcgcactccgacagcgtcaggtccgatacgtctttgtcaaaataccttctggctgccactttcacccccagggtattggaacccaggttaatggtattcagatagttggtcatgatggtctttttatccaccatttgattgagccggaccgccagatactgttcctggattttccgctccagcctgtccttaaacgatgtctccatgccgccctggaacaccgcatttttgatgagctgctgggttatggtactgccgcctccggcagaggaattccgggtcagaacgccctttacggctcttaaaatcgccctgatatcaattcccttatttgtccagaaccgttcatcctcgatggcaataaatgcgttgaccaggtcttccggaaattcttcataggaggcctcctcccggttcgtaccttccatcaccagtctctctgtttcatcgccggcgctgtcgtaaattgtagtggcaaatccctccggacgcaggctaagcgccgttatatcaggcgcctggtcaatgatgcctttcaggatataggctccggtaccggcagcggcgagaagacagagtataagtgacgccagtatcactttccacacggatgactttttcctgcggctgcctttcgccttgtctggttttcttcctctcctttttgggatcggacgttcattatcatatctatttgaactgttttttctatcttccataatgcctccaagcacttcggcccgcccgtctgtcatatgccggatttcagccaaactgcattaaaatatctcttttgatcagtattacctatccttacagttttaacagaaattcacaagaaatatccggtcggctgatagatttttatcaattatggaaaaaaggccgcgtacacgtcgccgccttcaagaaaaggggctgtcacacccaagtttttaactcgcagtgtgacagcccctttttgatgcttaacataagagcggtaaatctctctcctaaaacttaaaagcctctctccgaagaagaacgcaggccgtcagtcttccatgtttctttttatctcttccgggataaactcgcccatatactgtttttcagcaggttttttatcctcgaattccaggcggatttcttcatttgtccgttctgtctcctcccaaaattccctggccgaaatcaaacggcagccctgcccccggatgataatctgttccaggcggtctgaagtagccactgttacatcgtattttgatgcattatcatgggcaaatttttcaatatactggtccgcagtctcggcttccttcgtatagaccacatgaatattgtgatagtccaggaactccgtcttatgcccctgcacccggtaagcgtcaaacaccgcaatcacctggcattttttagctccctggtaattacaaaggatatccagcagctttcccctggcgctgtctatattccgttcggccaattcccggagctcttcccaggcaaatatgatgttatagccgtctataagcagatactgttcccgtttttcttcctttttggcgggccgggcagccgcggctcctgttccggagaggcggcctgccgtataagttcctgacggtgttttactcttactgccccaacggcgtttctgtgctcccgtcttatctcgtttatttgcatgataggtgcgcgcaagaatctcgtctatctcatctgtaccgagccagatttcctcatggccttcgtctttccttctctttttccttccgtttcgccccgctgtaccgctcccgtcctcaccgtcattgccttctgatatctccggaggcagacagctctccaggtgcatataatcaggcacctcatcccagctcacgacaaaaccggccccatgggcgcagaatacggagcctgacggattttccgtgtcgctgtccgcatcgtacccggaggcttcgattacctcgtctgcgttatggcagggggcatatcccttcagtgtacaggccagacgtcccagacctccggtataagccgtcatctcctgctggtacccgtccatgcaggccaccggagcgctgcctgacaggactgcatactctccttccatcaccggaggttcaaactgtccgtgcatccgttccacatccgtcatcgcacggcccagcatccgttccggcacctccaggcggaatccgtagacaggctcaagcaatactgagtctgcctgcatcagtccctgacgcaccgcccggtacaccgcctgtctgaaatcgccgccctccgtatgtttcagatgggcgcggcccgacatcagcgtaatcttcatatccgtaatagctgacccggttaagactcccttatgctctctctcctccagatgagtcagaataagcctctgccagttccgatccagtacatcctcactgcattccgttgaaaatgaaaggccgctcccggcttcggccggttccatcagaagatggacctccgcatagtggcggagaggttcaaaatggcccaccccctccaccgtattctgaattgtctccttataaacgatactccttccgccgaactcgatgttgattccgaagcgttccctgaccaggccctttaaaatttccatctggatctcgcccatgatctgcgcatggatttcttttgcttcctcctgccaggtaatgtggagctgtggttcctcctcctcaagctgtgccagcttcggcagcattactgcggcatctgcctcctccggcagttgtatccggtaggtaagcaccggttcgagaaccggcatggctcctgcctcctcaaagccgatgcccttgccgggaaccgtcccggacggccctgtcaccgcacagaccgtccctgcttttgcctcctgaacggcttcaaacttctcaccggaatagattctgatctggttgaccttttcctctcctatcagttccctgaccttcaggctcccgccggtaatcttcatataggtcagcctgttcccctggttatctcttgcgattttaaacaccttcgcaccaaattcagacggataatccggcatggacatatagtcctccatcccctgcataaaggcttcgatcccgtcaagcttcagcgccgatccgaaaaagcaggggaatacctgccttgtcagaatcatctttgtcacatcgtccctgtgaatcattccgttctcaaggaactgatccagggccgcctcgccgcacatggccagattctcataaaaaccttccgtcccctgttccccgaaatccacaatatttccgtccagtttcctagtcaattcttcctgtatggcctctttcctctctcctgccaaatccatcttattgacaaacaggaaggcgggaatcttatatctggcaagaagccgccacaatgtctgcgtatgtccctgcacgccgtccgtgccgctgattacaagaaccgcataatccagcacctgcagtgtacgctccatctcagccgaaaaatccacatggccgggagtatctaaaagtgtgacctgcattccgttccattcaagtattgcctgcttggaaaagatggtaattccccgcttcttctccaattcataggtatccagaaaagcatcgcctttgtcaaccctgcccagcttccgcacagctccgcccgtatagagcatagcctccgataatgtagtttttcccgcatccacatgggcaagaatgccgactgccagtttcttcatctgtcctgctctcccttatcagttctaaaaatattctctcctgacagtttatcacggaaccggcggaatgtaaaaatgttttgatggagaaggacgcgtccggaacggacctgggccggtgtggtgagggggcagtctccagtcccggcaaaaacctatcttcccagcaggccgttctcctcaaggaactgatgggcaacttcctcagcgcttttcccttcaacgtccaccttgctgttcatatccgccatcgttttttcatcgatccggccatccagctttgagagcacctgttccagctccggatatttctcaagcgtctcctgccttacaaagttgcacgcataatagggagggaaaaatccaatgtcatccggaaggaccgtcaggcccagcttgtaaagcagcgcgtctgtagaaaatgcatccacaacatcgacctttccgctgtcaatggccgtgtagcggacactggcgtccaatccgctgacttccttgaatttcacaccgtactctgattccagaaggggaaggcagtcgtccctgtccacaaattccacggtgcagccaagccggagttcctccgactttccgattagatccgacagcgtttcaagcccgtaagcctctgctgtttccggcttaacgctcatcacataagtgttattgaatcccagaggcttggacgtgtggatattatgctccgacctcatctgtgcggaaaccgtctcatatacgcgctccgggtctgagtccatcggctgtcccagcagatttgagagtgctgttccggtatattcgacaaacatgtcaatgtcgcctttttccagggcggcaaaacaaaaggacgcgccattcagtccaaatgatgttttaacctcaatatccgtgtcagcttcgatcagctccctgtaaatattaccaagaatattcacctcggtaaaattgctggctcctatggttatcgcctttttttcttctgctttgcaggcgctgagtgacaaaacggccgctgccgccgccaggcaccatatactttttgttctcatttaattttcctcctgtatagagcattactttattacttatagtctcattattactgccgccggaccgtatcaggctgccgtatagtagagcgctgataccaggataaacattccacacagtaagaaggctgctgccttctccctcttcttttccctctccgacttgtttttaatctgttccggagccaggagcccctcgctggttatggcccgttccaggcgtccgaaaataaaatcaaccagcagagccagggcggataccggaatcgctcccagcaggatcagctggtaatttaacgaattcagccccagattgatgaaccaccccaaaccttttgcccctgcaaatgctgcaatcgccatggtccccaccgccgccaccgccgcgatgcgaatgcctgacataataaacggagctgcgataggtatctctatctcaaacaggcatttccatctggaaagaccgattcccctggccacttcaatatttttcggatccacactcataatgcccgtatatgtatttttcagtatagggagaaacgcatatacaaagaccatcattattgccggtttggtaccgattccaatgaagattacggaaatcgccagcagagccaggcagggaatggactgcatcagattcgcaatagttaaagccgctccggccgccgtcttatttcttgtgattagtattcccaccggcacaccgactgccagtgagatcaggactgcaatcgtcgtcatattgatatgctgcaaaaaaagtatccacagttcttcttttttagaccaaaataattctataaaactgttcatgatgccgcgcctccttccagctctgactgttccgggataaactgtctgctcaatactgccagcagactgctctttgtcaaataccccctgatctcacgttcttccccgagaaccggtatgatgccgaaatggtgcccgtaattccttatcttcagcatcgacaacacattacggaaactgtcctcctctctgacgctcagataatcatcagagatataattgctgacgcttttatcgtagtccgttacgttcttgagggaatccatccagatcatccccaggaaccggttcttttcccctgttaccaataaactgtctatattgttctgtctcataatctgcattgcctgaagaatcgtccgttccctcgaaattgtgaatggacgtttcctcattatatcttttacccggataaattcgggattatgccacagcctgttttctccgataaaattccgtatgtaatcatttgacggatttttcaggatattttccggcgtatcgcactggatcacgcggccattataaagaaaacagattcgcgtggctatcttgatcgcctcatccatatcatgggtaacgaataccaccgtctttttatattttttctgcagccttaccacctcatcctgcaattcgctcctggtcaacggatccagggcggaaaatggctcatccatgagtatgatgccgggatccatggcaaaggccctggccacgcccactctctgcctctgtcctcccgatagctgagccggatatttgttcctataaatctcgggctcaagattcaccagctccagaagctcccataccctctctcttatcttttccgcaggtatatggctgctcttcataatcagggcaatattttcacctaccgtcagatgcggaaacagccctccctcctgtaccacatatcctatcagcccggacagctcggcagttccgatatcctgcacccgccttccatcgatcctgagttccccctgttcaaaggtattcagcttgttaattgttttcagcagcgtcgtttttccgcatccgcttgaacctatcagggtaaacaattcccctgtctctatcttcaaagacacgtcagtcagcaccgccttagtatctgaatatgatttgtacacatgttcaaactcaatcataaggtttcctcctctcctttatgagtctttattgtagcattcatactataaaaaacgtgttagcagaaggctgccctgctaaagtttccataaagaaagagaaagaagcccgcgagcgtgattatccgcctgcggcggggcgcttcggcggcataattccctgccggcgcagagcgatactccgcggagcatattttgttccgcgtcaccgccatcaacaaaaaagggggcagcccccttcttaatcaggttctgcctcctctaatgaaatcatgaacagggtgcctccatactgactgcttcggattatcattcttcctccgtttgcttccacgatttcacttgccgcaatcagtccgcagccgagtatattctcctgtttttcttcgtcactcatgcttttttgcaataactgcggtgtaatcccgcttccgctgtcggatatttcaagctttcccttcccctgctctttcgtcaggcttatgtaaattttcgtgttttcaggggtataaacaagcgcattatttagaatatttgaaattacctgtttcatctgcccggcatccaccctgacaggcaattctccatccggccttctcagccagacaattctctccccggcacattcttcatagcaggccagcgcttcatccacaagcttctgaaaatctgttttctccctttcggcatatacttccccaaattcgatgttatacatttggattgtatttactgtccggttatagagagttctgaatctcagatacagctctgagagacgattcctctgcctgtcttcctcccggcatccggcaatcacatttttaaattcctccatattcgaagtaaaaggccggatgaaattacattgcagggaatgatttaatgcatcgagaaattttcccctctgtccttccagttccactcttgaccgttccagctcgatattctctttttcaaccgccatgaccatttcagacataaccgtattgacaaaaaccatatgattgctgtcaacttcttttccgtccgtataaatcccgattactccgatacaggattccctgttctttaccggcatatagacccacctggaatcggagaaaaaacctgttccggctccgcataccgtattgttaataaagcaccagactgcaggcgtattattatccaccatattttcatcaaaatggctcttgataaaatatggctttcccagttcaccgggacttttggcaaggtatacgacacaccgttcgccagccgcctggaacaggctcttgagaacgtaatatacaatattatcaaggcccgacagtttcaaataaccgcagctgatttcgaacaatgccttcatccggttctcattgcgctgcgacacttcaacctgctccctcagcttggaaaccaatagtccggttatcaccgagactatcaggaaaattaccatcgtcacaatataattcggatcattgacccgcagcgtatagcgcggcgcagtgaagaaaaagttaaaagagaggatgcagattacggtatagatgcctccccacagaaactggtgtatctctatcatcaaaatgattacgcttatcaggtaaaccataataatgttttcagctcttacacgtatcgtccacagtcccagtgccagcagtgttgccaggatgtatatgactgtcatttttactatttttttcggtagagagtccgtttctcccctctgctcagatgccatcttcctatctcccttcagtctttttataaccgtcctttatttcccgtccgaactggacagccgcaacaaatatcacataaatttcaaggcgcccggctaacattccaaccgtctcagtccaaagcaccaccggacttgcgtcataaccggtaatccccaccgacagccccaccgttccaagggctgaggcaaattcgaacatggaatccccgattccgaacccacaggcgcagagtataaaagttccggccgcaaatactcccagatacaacaaaataaaatcggaagcttccagccgttcctctgctttcaaatattcatatccgctgattctgtagattccgtctgcatgaatcagccgtttctggctgatcttagatcggatgctccagcagaggcttttcagcattatacagacacggatttgtttgatcccccctgccgtagagcccgtgcctccgccaatcagcatcagcagtgtcatcaccaggataagaggactgctccagacggcaaatgagggcactgtctggaacccggtcgttgtcaatgccgtcacaacctggaacagaccgtcccgaaagccctgtcccacatggccctccagccctccataaatcaaaaaggccgatagtacaggggcggcaagggcacaaagaatgagttgaaactttacttcacagtatctgaaaaaattctttcccccaccccggatcagataaagatgcgctaaaaaattggtgcttccgagcagcatcagcacgattgttactgcttcaattccaaagctcccataatagccgatgctttcggcttttgtagaaaagcctccggtggataaggccgcaatggagtgattcagcgcgtcaaaccagttcattccaaaatatatgtaaagtaaggttccggaaataatatatcccgtatagataacgattatcatccttgccgactttaccaggttcggcacaagccggtccgtatgtccttccgcacaatagagcctcattccgtgccggtccgacagaaccgaaatcatcacaagaaccagacccactccgccaaaaaagagcattacgctgcggaacagcagaaaaattttcggacagtcctcgacattgaccacggaaagccccgtagtgctccatccgctcgtacactcaaaaacagactgcgtaaaattatactttcccgtcagcataaagggaacagaacaaaaaagaattgccagcagccaggaaaacactacgatcagcgcatcctgatgtccaataagcctccgcttatcgcggccgcggataaacagagacataacataacctgtcagtattgccgtaacgcccggtatcgtaaagcagctggcatacacagattcctccggataaaccgcaagcagcatgatgggaagaagtatgataccgccgatcagcatcagtatgattccgagataccctgcaatcaactgcccgccgcctacctcgttcctgttctcatccattataaaggctcccttcccataatttgcaggattgcctcattctgagtttccggagtcgacagcaccagtattttatcattaacctgtatggcggtctgtcccttgggaacgatgatctgcgagcttctgacaatacagcagataatcacgccatcccccagctcgatttcatacagttttttccctgcaacaggactgttttttccaatcatcaattcattaattacgagattcccctggtctaacggcagacaattaactaaattttccaccaccgacatctgctcaataaagccggcaaccatgtaagtggcgctgatagccgtattaattccaagttttttaaagatatcgacacttttcggattgccgacaacggcaaccgttttcttaacgcggtaaagtctcttggccgtctggcaaattgccagattatccgcatctgcagctttcaacgcaataattacatccccgtcttcaatatttgcttcatctaatacatatagcttgcacggatcgccatgcaccaccggaatctgatgagcctggcttaaataggtacaaaattccaaatcgtcgttgatcactatgagctgatgccctttcccgttcaaaaggcgtatcagataatctgctttcgctttgccgcccgctattacaatcttcatctataccatctcccatctgatgatccttatcgttatagaaccgtagaactcaattcccaaaacttctcgacagacaaacgggccggatagatcgcccggatattcagcccgccaatcagatgctccttatcggtatcgttgagacggacaaacacctcttcaacatcataaatccggcgtgccatctgggccagcatacaattgacattgtcatcgttcgttgctgcaacgacgacagacgccttccagataccggcctcttccagaacatccggatcgagtacattgcctacaatctgaaaaccgctgaaatttgccggcagcttacggaaagcgcctccgtctttttccactacaattacattattgccatgctcagacacctctccggccagacttgcgccaaaccggctgcaccccgcaataattacagtttttcttctattccacatataagatcccgccttacatttcaactgctgaacgctgatttatatttccattttcacaaagtcttttccaaattataatctcagaaatcgtgaatatcaatcatcccggcaggaatttactatcgtcttaatgccgtggctgaaatcttaatacgttctttatctctttattcaaatccgcgggtttgcggtcagcccatacgcacataggtcactgtcttcaaaaaaaggagcagccggcactccggttgctcctgaaatatctgtacaacgtatcaaatcggggaagcttctcctataaaccagaagctgtcactctttccatgcagattccttcattgccccttcaaatctcttcaaatcgttaatcttcctcttcactgtcgccgtcatcatcgctattctcacttccgccatcttcgtcgtcctcattactgtccttatcgtctttgctattatcctcctcatcattgctgccgctgcttccactgtcgctcctgactttgctatcgtctgtgtcagcttcttctttctgctcctcatccgtcccgccggcagattccggcttattatcctctggtattcggactggctgaatgtggacgggctttgccttatcacctgcgtccgtttttttatcgcctccgtccgggccgtcctttctggcatcatcgctgtcccggtcatcatcgtccttctcatcgctgtcaggagcatccgctttcatgtcgtcatcgtctgcatcatcactgtcagaagcatccgctttcatgtcgtcatcgtctgcatcaccgctgtcagtaacatccgttttcatgtcatcatcgtctgcatcaccgctgtcaggtctatcgccatgagtcttctgttcctggaatttctgatgatattccaatagatccatcggctcacgattgccattttccgccgctttttgagccatatagataccaaggctgaccgtttttgcctttgcattcttaacatcgcgtgcatcgcccttcaggtataccgcagcctcgccggaaaatacaaattccaggtgactggccagagccgcctcctcgtcaggattcccctgctttatcagggcatatcccacgataaccccttccgatcctgccatgctgccaaggagcggctgcgcttcctccagcctctttcccaccaggccattgagctgattttcatcctgtgatgctccataagacttcactcggataatacggtactctttatccagttcaagctccacatcaccggttcctactgccgataccatagcgtaggctttttcctgccccataaatacggagacaaatatcagcaggaaggccgctgcagcacaggcagccgctttcacaaaggaacgtctcattcttgctatgggaaacggaaccgtcctgtttgtcttctcctcctggtatagatcctccggcaaaatatatatttggtcgcccacacgcattccctgtttcttatgaatccggatcacggcgcctttttctgtcattgcgaggcagtatttgtcctttatatccaaaattatccctttgtcatacatggcggacgcacctcactccctgaatccagtcaagcagctccggaaattgcctgacaaagatgatcattgtggccaaaatgaaaatcttacttccctttacgattttttccgtcacccttgcgatgcgggccacctcccgcacgggcagctttcttttacggtatgtcagttccaccgtgtgctgatcctggctggctgtcttcgccacatccatggctgcaatccgtgtatccttatgctttggcgccgcgtccgcaaggtgttcaagggtcagtccgaacagcagcaattcctcccggtattgcaggatttcctccctcagtccgtttttctcagccgggtcctcacaggatggctccagcccgacttcccgcatctcctctaaggatattgtcttaagacgtcctttttccttccgtacaaagttttttagcctgctgtcaataaccagcctggtaaatccgaggaatccccccgctcaggctcgtatttttccaccgcttccgcaaacgcggccagagcaacgctgaattcatcatcattttcggtggaaacatatctcccggtaaattcgctgaccgtccgaatgagaaatggcatatgctcttttataagcccctctaaattttctttttcaatcttctcccccgacaaattattcagcacctccccagttacctttatcaaaattatatcaaaagtccccggtacttacaatctataaaatggccaaaggcctcaccggccgccggttaggcattacaggccagaaggttgacgctgtcgattccctccagcccgaaaagcctgtcaatcatccggttttcttctgtccgggcaatgctgacctcatagaccagctcaaaggaatcagttaggatgttctttgctttcaccgcactggttccggccagctggttcactacatcctgaatctcgtcaatatctgtgctgctcccccgcaccaccagaagcatgggctgatcgtttacagccgattttctggtgcccagcatgattcctgcaaggaagaggctgcctgtgcctccgatgaaataactgccggtagccgcggcaattccgattgccatgctccagaaaataaatccaatgtcccgcggatccctgatattagtcctaaagcgcacaatggacagggaacccagcattcccagagacagtgcaagattggactgaatcaaatccatcagtaccgtggagatcagcgccaggcttatgagggtgacgccgaactggggcctgtaaccttttcctttgttggcaagccggtatgttccccacatcagcgccgctaaaagcgctgcccataaaaggctgcccataatggcctttgtatccggttttgatgtgattaaacacagaagctgatccatattctcttgaaattgttcgttcatagtttttactccccctaatctaattttttatctgataaattaaagccgctaacctccttcagagacagcgcggacaccccgggcatttcctgatccatgacagtctccggccataccgcagagccgtcggaaacaaaatccacagccaattgcggtccctcggaataaaaggcagttaccttgaagctctttaagcgggcggccatttcgggtgtgcatgaatccggattttcctccatattgccgcaaatcaggccgaattttggtttgaccttctcaagcagagcggccgaagtggcatccgtttctccgtgatgtcccagtttcaggacatccgcgcgttttttcatatcggaatgcagaaattctgcttcctcactcttttccatgtcaccagtaaagaggtaggccgtgttcttccaggaaaggcgcataaccacggaattattgtttccgttttttaaatccgccttgccgggcacccatatatccagcagggcgctccccaggctaagctgctcgcctccctttagctttacaaccggaaccccaagctccccggctgtttccacggcatcgatatcacggtaggatacggtgtcaagggcggacaggtaaagtgcgcgggtgggaaattctctcatcagagcctccaggccgccggcgtggtccttatgcccatgagacaggaaaattccatccaggcctgcgattcccttgacccgcagaactcttgcaatctgcgggaaatccccggctttccctgtatcgcttaagtaaaatccgtgctccggtgtttcaatcagcagggcatctcctttaccgatgttgataaaggatacccgcaggcgttcatctgattgtgaaacggcattaccgccagagggatcacccgttgattcaggcgcgcagcctcccagaataaccgttgccaggatcattgccaaaattataaaatgtttttttcttatcatttacgctccccctatgccaccttcgtctcaggggccaggacattgacgccgtgtatcccgtccatggtactcaaaagggtgagtatggattcctcatccttctgtcccagcttcatttcatataccagttcaaaggtattggcgaatatatttttgcactgcacggcgctgccgcgggcctgccccataatccgttccacattggcaatctggcatttatctcccctcaccacaacggtaagagcatttttacttttaatatttaggctgaacgcaagcataatcacggccagaagcagggttgccataatccctgcggcaaatgcgccgatggccgatgaaatcccgatggccaaagcccagaacacaaagcccaaatctctgggatccctggtattggcgcgcacccggcagatggaaagagagccaaggatgcccagggacagcagaggattattctgaatcagcgccagaagcagggtggaaataaaagagagcataaggagcatcacattaaactgtttgttgtaagtaagagaatcgtggcacatccggtaagtgatgaacatgacccctccaaggcacatggtaaatataaggctgaccagcaggtgcataggtgtcagaatatacggctcagccaggttttgttctaaaaatattgctgataatttactcatttcataatctcctctctattaattataatagctttttaatatttcacgcgatgttccgaatttgctgggtggctttctcgtaaggtcacagttggacagcgcctgctgaatctgccggaacaggtatcgatcgtatttgatttccaggatggtgtcatcctttggcatggcggccttgaaattcagccggtgggaaaacaggtcgtggcagaatccgcagtagcgcatattattatcaagcgtcacccttgtgttgaaatccgggtgggtataggccctcctgtcatactccaccagggaaaccgggcggtacagcgaatgtgtcataagctcataagcgtaacgggccgtgggatggctgtagttgagaagcacgctgtagttgcactgcagaatccgtatggcgtcctctcttgtgaccacgacactttccttaagttcccggccaaagctcttccgcttcagctcaaattttgcctttgtatcgttcgggtggtaaactctcagccggatgcgtttcttttcgtccttgtgacattgtttatccatataatcctcatttatgatactgtcgaaatacacgctgcgcaccgtatatccgttatagcctccgtaggcatcgggaatcagaagccggtcgagggcgtttattaaatagagccggtccgacagattcaataaatatttaacttcccttctggaaactgccagaacggcgttttctttttgtgataaagccatttcattatccctcccttttttggtcactatataatacaagggtggggctggatttggggaccatttctgagaaaatatgaaaaatattgaaagaattaaactttacatgataagattgacagtgacccggttccggcagcatgaaaggcagaggatgaattcctctgcctttcatgggtgtcctatctctttttaccctgtcatgtctgttgatttgttcgtcataaaagaatttctccggctatactattttgaaacataccggaataaggtctcaaataatttctgcggctcaatcggcttagacagatgggcgtccatactgatatccagggacttcttaacatcctgcacaaaggcgttggccgtcatggctatgattggaatcgtctttgcctgaggatgcctgctctcccgtatcgcctttgcggcttcgtaaccgtccattaccggcatctgaatatccatcaaaatgacatcatattcattctcgctgctctctgcaaagacttcccagcctatctttccattctctgccacgataactctggcgccggctttttccagcatcttctttgcgaccttctggttaatgggatggtcctccactaaaagaatcgtgatgccggaaagattctgtatctccggtttcggcggctcttttttggggacctcctgctcatctgccagacgtattggtattttcacgataaatttactgcccctgcccggttcgctttccacttcaatgctgccgccgcttaattccactgtgcttttgacaattgacattcccaggcctgttccctccacattgcctgccgcagagtccaggtgccggaaaaacggttcaaacaggcatgcccttgtatgctcgtccatgccgattccggtgtcggttacggttatcctgcacaatatgtgatcaggcctgcagcaaggcagttccgcgaaagaatagtctaccctgccgccctccggcgtgaatttaatggcattgctcaaaaggttatccacgaccctgttaagccttgccacatctccgatacagcagtcatgccgtatatccagagaatgtgtgaagaccagccctttagcctcggccagcggggcaattcgttttacaatcttctgatgctcctcacggctgctgaactgttcctgcagcatttccgctttgcctgactcaatacggcttatgtccagaatatcattaattatggaaatcaagtgcgctgaagaggatttaattgtcgtgaaactttcatggatctgctcccggtccgagagatcggaaagggcaagctctgtcatgcctatgattgcgttcatcggcgtcctgatatcgtggctcatggccgccaggaaatcgcttttcgctttattggcagcttttgcaaattccagggcttccgacagattcctttgctgttcctgttcctttaaatatgtggcggtcatatcagtccttgtaagtatcactttcttctttgtatcgtcaaaataggagaatgtccacagcttccgttcccgtttaccggttttcggattgacgatagaatatgcggtctgataatcattgcccgcttctcccaggccttttaatatcccctgtatcgtgttggtattggaacatgcttcccgctcttcctccaccacataggtaagcagcccgtttccaacccgcatatcgtagttctctcccctggcaggatgatcatattcccccatgcggtcaatgatcctgtcaatattcccgcttgctatgtcaatcaacgcaataaaatcaaattcctgttccacaacccggtttatgattttctcggcaatcacctgctgggacatgtcactcacggtcaaaaagcctattacatcgtttttgtcgggagccagcattgtatccacatttacctgtacataaagcccttcgccctcatccctgaatttgcagtagtagatattgttatggttactgattccttttgcaaaatcagccagcagcggtttcgccagatatgtatccaaaaattggctccgttccttttcatccacaatagcgtcagcaaaccgtgtgaaaaattcatctcgtacagagccgtagcgttgtccaaaatcctggcccgagaaatcgttcagcccctttatgatattttctttcaggctgcagtatccggtgagaagagtgtccaggttcttcttatttttatgcagcagaagcatttcttcgaatttttgcctgtgctgtatttcacggctgatatccatggcgcttcccaacgctgtcctgcgtataccgtcagcgtccaccaatacggtataggacagcctgatccaggaatattccccggcttttttatcaaatacccggaatattcccgaaacctcccgttccccttcccttatatgctgaagcagcagccgggcttttggggcatcctccggatggaacagttttccctctatcagcccttcctgtatctgatgcgcatgcaggccgtaagcgctgaccaccttattcccctcaaggacagcctgccgttccatatcatatttccatgaggtcacgccgttctgccgcatgacttcaaaaaacgtctgttccagctccttatatctgtcaatattctcggccgtgcagattgtccggatcgccctgccggtgtcatcacagataacattgcagcggaaattcatccatatccatctgtctgagccgggaatctttgccctggcgctgaattcctcctggagggagccattgtcaatatccgcaaaagccttcctgtaggtcttctgatcctcttcatgaatatatcccatcctcagccaggtttccgggaaattatccactattttccccaggccgaaaaggctctgtaccttttgtcccgaataagccgtatggctgctgcagtcatattcccagaacataaggttggaatggtctatggcctgttccagcgcctgctgctgcaggtactgcttcttctgtgcctcaatgcggtcagtggcatccagataaccgatatatataattctccggccttccctttcagtcagggttgccctcgcctgcacccacacataagtcccgtccccgcagacaagccggaaagtatcgtccatctgatcaccgggcttttgaagtctacggtaggcggcaatcacacgttggatgtcatctggatggaggccgtcaaaggcgctgtccacatatacctgataaaactgttccctggtcatcctggttatgttcaaaaatccctggctgacaaaaatgggaaagggcattcccgcgccggtaatctcaatggtcaccaggccgccgggggaattattgaccgaatcagaatattccgccaggagacggtcgttctcctgccgggccttcagcagttcaagctctgcatttttacgggcagttatgttatggtacacgcagtgcagcaatgggtatccatcctcatagcctatgacctttgcctgtatgcggacccataccgtatccccattcctgtggtacatacggaattcgaaatcagcggaagcattatgttccgcagcataacgcagtttccgcattgccgtctgtgtgtcttccgaggaaggcattgctgaaggctcgtcctttatcacccgtctgtactcctccggcgtataaccggttagctccggaactcctttggaaaaatactgcatatcaaatacatctgaaaccctgtaaaccgcgaccccgccggggatggcatcaattacgttctgcagcttcgtttccaggaaaaatgcctcaacataatcccccggcatggaagaatgaatcaatgtgattttccatccatgactctcctcctcacagtttgccgtaacaataaatggagctaaaaccggctctccctgctgtgacagcaacgtatatttcacggaaacttcaaccaggtccttacgccgttcccgcagcataaggacctctgtctctcttcctgatacaaagggcacagttgccagccctttggacactgccgtacgtatctgctccagtccgtttgaaacctcgcctgtactgactcctaccacatgggcatccgcagaaaaacaggacagtatgatttccagattcctgtgcagaaaatatgcttcgttcaatttattgacaagcaccagcgcagcattcaaatttcccgtcatatcattcttctcctgactgtcccaggaccctcagaagccgactgaattccgcttccaccagttcatagagtccgtccactttttcatactgttcaaatcttaatgcccctaccatatcgctgacggcattatacagcggtgtaagtcccaaatttcctgtgacgccctttaacgtgtgggcgtattcaaacatttctttgtattccttatgttcatatgcattttttaaaagaggccagctgctgtcagaaagaaattttgtgagacattctgcatataaatcctcatcccccacaaatctttccattgtctttttcatatccacaccatattcagtcagtactttttttaacgtatcagccatatcatccccctcggcagcagccctcttatgtattttgtaatcctgctgtaactatctttattttacacttttttaggcttattaacaagacaaatatgcgcttattagaagcagccggggggtggaaaactgatacctgcagataagcctgaccggtgatactgatcataacagacaaaagagccataacgaaatagaaggcctgatatctggtgggggcagatatcaggccttctatttcgtttttctttgccatctggaatgattggctgtggcagaacggcagaacgcctgccgccccgtgttatttttcttccttcataacctggataatctcgttccatccgtccggctttttctccacatagcgtgccgcaaagtcaaactgctccatatcttccattctctccttggccgctttcgtcatgacggagctgaagccgcattcctccagcatggcgatggagcctttcagctcagccgcccggcggtggcagtggattgccgttccggtaacgagcctgtcgaggtgggaggtaaaggggatgttatccatggacttcgcaatggaagaaacgacttcctctgatacgtcgtaggcatcggccgcctgtagcatctcgatcatcagggaggcaattcccttcatataaatacttctcaccagcttgattgccgaggccgcgcctgccttttccccggccgttgtaatcttcatgccgtaaggcgtcatcatttctttcagtgtatcggctccgtttccgctggcggtaatcggaacctggtgtttgtcttttggaagggaacctaacatcgcggcatcaacgaatttgacccccgtatccctgacggcctcccagattttttctttcactgcaggtgtcgacgcgctgacgtcggcgtagattttcccctcgcaaagcacatctttaatctcatcacagacatcgagggcaaaagaggaaggtacagccccaaaaattacgtccgcctgctcagcgacttccttcgccgtatcaagaagggctgcctccgcctccgcggcgcggcctgccaccatcggtcccatcacaggatccccggccatcttatcgtatgcaataattcctgttacgccttcccctttcagtccaagggaaatattatatgcagcttcgccgaaaccgataaaacctatcttcatttcaatactctcctttatgcttcgtatgcgtcatcgataaattcaaatccttttgcttccagagattttttcacccattcacgcttggatgtaccgttctttgcagcagccagctttgtctcgtccgcagcctggaattttttcgcatcctccagaatctgaggcgcgtcttttctgggaattacgatgattccgtccggatccgccaggataatgtctcccgggttcacgctgatctcaccacaggaaatcggcacattcacctcacccggtccctctttgtatgggccgcccggtgtagttcccgtagcgtacacaggaaaatcccattttccgatctcatcaatatcgcggatcggaccgtccagaataattcctgccgccttcttcgtatggtagagaagggccatcataatctctcccatcagtgccctggtgttatcgccctcattggaaactaccagtacgtcgccttcctgggccatatcaatcgcagcgtgaagcgctaaattatctccgcttcttgcttttatcgtcaatgccggcccgaccatcatctgtgccttcggactgctcaccagacggattcttgggttcatcgcgcagcttcgttccattacatccgccacatttgaagccggaatctccttaaactgcatcatcacctcgtgatccggcattttccttttcaaataaattctcttaccaactgccatactgtccaccatacctttctttttcagttaaatgaatattcctgaagtcttacggtcttttaacgcctccttgcgattaccggctcccggaggcatacggccgtttccatcttttattcaccgcttattttctatatctgaatcatagcacagcagagagaacaatttcaaacaaggtatttttatgtttttaacaatatttctttgttatgtatctgttttagtgatatactgagataaacgctgccgctcaatgcagcttaacaagaatctggaaaaggagtgccgtacatgaacctgataagcctctattattttacggaactggccaaagagctgcatatgacaaacactgcccagaaactctatatcacccagcagaatctgagccagcatatccagcggctggaacaatattatggcgtggagcttttttaccgcaaaccaaagctttccctcacctatgccggagagcagcttcttctggccgccggcaggatcctgtctgaagaaaatgatttaaagaaccggctcagcgatatttccctcctgggagcaggaaacttaaaaattggaattccttcctaccggggcgaaatctgcctgccgtccattcttccccgcttccatgagctgtggccctacgtatcgatccagctagtggatacctcctcggaagtgatggagcagatggtgtttgacggtgaactggatctttatatcggcatcaagtatacggcggatccccatctcgaaatccttccgctgctggatgacaatctgtttctcgttgtctccgactcgctgatggtaaagcagctgggagaggaatgcggcacagtgaaacgccagtccgccggcggcgttaagctgaaggaatttaaggactttcccttcctgctgccaaagccgccgatgcgtctgcgcaaaatggtggaccaatgttttctggatgccggattcgtgccgaaggtgtttctggaatccagcactacggagcttttaatttccctttatccctatgattacggcgcctttttctgtacgcagatgaggctcccgcttcttgaggaaaaagctccggacgccaataccttccccctgatgctgaacggggagcctgtaaggcaccggcttgtcctggcctatcataaggacaggtaccttcctaaatatatgaaagatttcattgatataacgagggatgtatttgccgatctctcggatatccgtctggacaaaaaagcggaccggacataatggcaagttaagtccggcccgcaagggggtatgttaatatgtattggctgtttagttaactgctgtatcagaatggaccgaatccgatcttcgtcgcataaatcaggaagataaaagcaacgatccaccacataacaaagagaggcagcaggtattttacccattttccgtaaggggtcttacacatggcaagggcggccaggatttctcctccggtaggagcgagtacgttggtaaacgcatctcccatctggaatgcgagaacagcagtctgacgggtaactccaagcatatcggcaagcggcgccataatcggcatcgtaatcgccgcctgaccggaaccggatggaaccagtacattaaatatatcctgtactacgaacatgccgcaggccatcatggaggcatggagattattcagtgtgctggcaagcgcatgtacaattgtatccatgatattggcatcctgaagaataacaatcgccgcatttgccaaaccgatcatgatgcaggggaacaacatgttgccaaaacctttttcaaagctatcacagatctcaccgggacggagtccgccgactatgccggccaggataccaatcgcaaggaatactgccgaaagctcatcgatatagtaaccattaacaattacgccatgtacggtaaagatgattcccagaacaaatataatcaatacaagtttctggcgcagggtcatcttgggaatattatcaatatcaatcacatgctcatgggcatgggccatatcatactcatatacagagcttgatttcggatttttcttaactctgctggcatgccacataacgtacagaatacttacagtttcaagtgtgataaacaggacgaccctgagctcgattcctgagaacatcggaagccccgcaatactctgggccacgccgatggtaaaagcattcgtaatcgctccgccgtaaccggcgcctgccgcacagaaaatgatgccgactgccgtcagcgagtcaaagcccatagtaagacagcatgccaggaccagcggaacaaaggccaggaactcttcaaaatttccgcagaaggcggaaccacagccaaagacgatcatacaaataggaatcatcagaagctcttttccccttgtcgccttaactacattcgccattccggcattcatggcgccggtggcatccagtactgcaaaggtgccgcctataatcatcaggaaaaatataacataagccgcattctgcaatccctgtgttaccgacatcaaaagtccaaacagggttacaggcgttctggctatataatggaaactggcaggatcaactatctctctgccgctggccgcatccagcacgcggtcatatgtgccggccggaacgatataagaagctatggcacaaagcgcgattatcacaaccaggaaaatcattggatttaccgcttttagggcgagtttctttttctccgcctccactacccgtccttccgcttcatttagatttttatcttcccttttatcttccatactgctctcctttctcatacataagatataaagcttttttaatttcccctttatgattctttatttgagttcctctaaaatactgcacaaaaatccgtatgcttttctgacggacggaatgcttaccatctcggaaggagaatggaaattccagcagtcgggtcccagcgagatggcgtcgagagacggcttgacctcgaaaaagcagcccacctcaagccctgcatggacggtcagaactgtcggttccgaaccgtatttctttttgtaaacctccaccgcagtttcacgaagcggcgaatttgcccggaaatgccagcttgcgtactcaacttccgtgctgcactttgctcccaccagggaagagagacgttgtattttctcatagatatagtatttcagactgtcctgtgccgaccgtatctcaaataccatcctgaattcccttctgtccatatgaagttcaccgagattgtcggatgtatctacaagcccggtcagcacctcattcatctggcagattccgtccggagccagcagtaacagtgtgacaatcttatccggggaaacctgggtccccgctaaagggatttcctccacggtaatcttcagcgatgatgacgtctgctgcaattcttccctgtatacggcctgcaattcctctgcgagctgtaccagtttaccgtagtctgaggcagccaggcttaagtccgctctcgcttcccttgggattgccagacggtaggttcctccttttacagcggaaattccatatgtaaagcgttttccggcctccgccataaatcggccgagaagtgaattggcattgccgtggcccctgtggatatcctcaccggaatgaccgcccttaaggcctgttatcataacggtatatgttttccagtcttgcggcagcttgcgatgttcaatcggcagtctgatttccgcatccattcccccgcagctcccgctgagaatttccctgtcacatgcgtgatccaggttaatcagataatccgctttcatccaggacacatcaaaaccaacagctcccgtaaaatccgattcctccgccacggtgaataaaatctccagttccgggtggcttaaggttttatcctccaggactgccattgcaaaggcgactccaatcccgtcatccgcccccagcgtagtctgtccccctgtcgataaattgtctccgtcaatcacccatgtgattgggtctttggagaaatcgtgggaactcccctcattcttttcacacaccatgtctaaatgtgcctgcaacatgacggcaggcgcagcttcatatcccggcgacgccggtttcctgataaaaacattgtttaccgggtcctgtctcgcctccagccccaaatcaagcgcccacttcagaataaaatcactcagcgctttttccccgccgcttgggtgcggtatctggcaaatctgatggaagtgataaaaaacccgttcattcagtaactcctctttactgtaccccatagaaactccttcctaaaaatttaaccgttttctaaccctctgcccactttttataatcaatgtttactttataatcatgattataaatccactttgtttatctgtcaatactaaatttttaatataatttttacacttacacagaatgttttaatattttatgtttttatattcatttttcctgatgcttttccaataagatttaaaatacttcccaattatttgttaaattgtatttgttttagtgtatcttttacagaaaatcagtcaaaaaaatatactgctctcactcacaaacctttaccgccaatcagcgcaaaaaaggagatgctgtcccggatatccggtacagcatgccgtaccggcgtccggaagtacatctcccgttcttattgcagttttcattatgttcttactgaaattccggcctcttattgttttcctgccatctcaagtatatattcaaaaagccggttaaacttctcttcatgttcttctatattgaggctgtcgcctttaaggtaggcttcatagatgaaattctgatggagcgcgatgatcagttccagggtaatatcggctttctcttctaatacaaaaccttcctggaccatgctctccatcgtgatctcgtcgcgctcgcgcatactgccctccaccagcatcttcttcatacgatcattcagcccctccagctccgaggggaataattcctgataatatacccggactaccgtgcccagtttattgctgtatcgtccaaaaaacatgttatgaaatatctcaggataccggaacgcaacccggttaaagcagtgataaatcgttctgtatctgtcaaccgacgtcatattctgctttaaagacttacccagaagtacgatatattcacgcaggtagcaaaccgagccgaatagcacgagatgctccagatcttcaaaataattatagagcgtggcgctgttatagccggcctcactcgctatcttccgtatcgacagcccctccactccgtctgaacggatcagtttctccgtcgcctcaataaagtaaatcattatccgtttgcgttttaacgttaaagccacttctccgttgcctgtctctatctctgtcatacgcccactactcctttcccagcctgtctgttttatgtcggggatttcgaattttaatcattgacaaatcagattgccgactatataatgagatcaaaccgtgtaatcatgattattttttaatcaagattcatcctcctatacagtataccacgtttcttttttataatcaatcatcatattccgttttcggatatgaatccttacggtccagctctaaagcgtgtttgaaaattgctttctgtcagctgtgcgtcacactttgtgggagatttggtacgaatgaaggaggcgtagtgggctacgctgactgaatttgggccaaatatgccgcgaagcggagtgtgcagatgtaatattttcaaacaggtcccgggccaaactgtaatatatattattgtttttcctgaaccaggcacccggattttcccttttccattgcaaaaccggtgtgcagaaacaatatgcgacaaccagcatatggaggtatggttatgtctaacatccgtaattccggcaccatcctggttttcctcggtgccgtattctggagcctgaatgctccgcttgtgaagttcctcacggcagatccgctgctgatttgcggcctccgttccattatagccggaattacactgatgccctttatcagatggaaacggcttaactggaccccctggatgatcgtttatatcagctcctactgcgcgctttgcatcagcattatactggcgcttgcgaaaacgtcagccgcgattgctatcgggatgcaatacaccgctacgatctggctgttcctcgccaatcttataattaccagaaaatttaataaaaaagcattttggcctgtctgtgtcatcttcgccggagtaatcttctttatgttctccggtacggacaacagcagcagctccggcaatatgatcgcccttctggaaggaatcttttttgcattcatgagtgtcggagcaaaaaaatccgccgggaccaaccctcttggactgactgcgatcgccaacttagtcaccggtatatttgtctttacggcctttccctccacagcgggctatatgggaacgctgtctgcaggcgactggacggtgctgctcattctcggtatcatccaaattggggccggatatggcttttacaacctgggaattcagaagatttcagctcaaaaggcctccgtcatcgccctctgggagatgattctcggacctgtctgggttgccctgttcttaaaagaatatccgacgccgcttgtacttaccggatttattattattctggccggaatgctgttagattctaaaattaacgtgccgcaggccaggcaggctgctctataaaaatatcttattctaagcggatatttcatgtcaagaaaatatttatggttctatactgaatgttggggtgtgctgaaaagcacacttccaacattcttttcgttgtaataaaatacatctataagaagcctcctaaacgcattatcccgaccaaagtttaatgttatggaggtgaccccttatagatgtaccctaattataccaaggctttccttaacttggaaggtgtttctattaaaaaagtggttcaggcagactctttcattaaaattttcatccagtcccaaccggtagaacagacttgtccctgctgtggggctaaaacaaaacggattcatgattaccgtttacaagaagtccaggacattcccttactgggaaaacaagtaatcctgcttcttcgcaaacgccgctacctctgcccatactgccgcaaacggttcacggaaccctattcgttcctccccagctaccaccgcaggacccgcaggctggcattttacattgtctccctgctccggcagaccttttccttaaaacagatcgcagagcttaccggtgtttccgtccagacggtctgccgccttctggacacgatttgctatcctccgcctgaccagcttccacaagcgctttccattgacgaattcaaaggcaatgcttctaccggtaaatatcagtgcattctggttgatccgaaaaagcgccggatcctcgacattctcccagatcggacccagagccatctggctgattattggcggaacattcccaggaaagaacgcctgaaggtaaagttcttcgtctgcgatatgtggcgcccctacaccgaacttgcacaaaccttctttccaaacgctacaatcatcgtggataaatatcatttcatccggcaggtgacatgggcgattgaaaatgtacgcaaacggctgcagcgctccatgccggtttctctgcgtaagtattataaacgcagccggaaactcattctgacccgctacaaaaagctgaaggatgagaacaaacaggcctgtgatttaatgcttcactatagcgaggatctgcgtctggcacaccgcatgaaagagtggttctatgatatctgccagatggaagcgtatcgtcagcagcagagggaatttgatgactggattgcgaatgcgcagagctgtgggatcaaggaatttgaggcctgtgctaagacctacagggcctggcgaaaagaaatcctgaatgcctttaaatacgggctgacaaatggtcccacagaaggatttaacaacaagataaaggtattaaaacggagcagctacggaatccggaatttcaaacggttccgaacccggatacttcactgtacatcataggataaaaaggtcggtaatgcggaggcttatttggcatgcccaaaatcagtaaaacctggaactaaacataaaaagggcccttttcatagaattggggcgggattttaacaaatcccaccccaactattgacaaagagccatatttatttatataatgaaaaagggattggcggctaaatttatcatcagccgtcaatccttttattggtttcggtggcctgtgcgcggagcgtgcaggttatcgttatctcttatggtggttttaatcgaaacacggatagcactctcccctgcacctcctccatggttccggcagcaatcgttgcattgcggctgtccattgagacaggacggttatctcccaggtaaaagaatgtgccctcatcgagcgttaccggaaatttgatccattcatctcccggctgatagccatataacacctcgggttcatgcagcggcatcccgttcaatgtcacgtgcccgtaatcatcgacggataccgtatctccagcgacggctattactctctttgccacaacagtaccgttcccatcgccatttcgaataatgagaacatccccccgctccggctttctgataccaaaacgctgataaagcagaatgtctccgtgacataaagccggtctcatagagttaccgctcagaacggttactcccaggaaatattgaaatatggcgtaaagtgctaacagccagaacgctgcgatacagattcctccgcgccatggtttggagatccgcttccgtgatttcgcccgccttccggtcaccgaaagctgcggtccctcatcccgcagtttcccggtttcatttgcttcggacacctgctctgcgccctccgtttcccggggctttcttccctcattccccggaaggcatctttcggcagatccgtcccgccgtcctctccatccacagcccatagtttcagcagttcctctaaatcttgtgtcagcgccgacggatcctccgggtccgatatactttggccctcatccttcccgctcatgtcatccggcatcacttccctgttcctgcagctgcctttttgcctcattcttcaatctccgctcaagcttccacaatatggctgcgtacaataccagcagccccagtgtcacgacaacggatatcggatgtaacctgtaatagcccttataaaagtaaatccagcaggccgccaggacacaaactgccgcagccagctccgcaattacgctgtacgtttggtctttcaggatctttttgacattgatgtccttatatttctccatccttacgtccctcctgtccgcttaaatcccgggtgccggcaataatttgccgcagccggagcaggaacagcagtgtcatcagaactgccagcccccatataatgacgtttacacgttttgataaccgggaatatgcctcttgagccgctgtttccgcattttgagtgtctttttgtaccagaatggagtctatatccctgccgtcctcctgctcctctgccccggggccttccccggcagttttgctcctgcgtctttcatctgcccggtttctgcatctattactccggccggccgggatttttcctccgttccggacggcccctcacctatcccttgttccggcccggatggttcttccggatatatcacttccggtatttccgcctgtgcctctgactgtgcagggaactcaggctgcgacggttttcccccggaacctgaggaactgcctccattgccgccggaactcccatccgtatatcgttcaagtgttatgcttaccgtggtatggtccgtaatctgataggggccatggacctgttccttccatttctcctgttttgggatatatgcctcatagctgagtggggacggatagacacggaatacaatttcgccgttatcgtcggtcagatatctcttatccccgttgatctgcgggccctgccctgcttcttccgtcgtcccggccttcctgacaacgatgtaaatcctgctctggggtatcccctccggtgagagaaccctcactgtcagatcgagccaaccggtataatctgtgtcctgaccgtactgctcaattccaaaggtggtaccgccctgctccgccaatgcctccatagggaacacaatcaaaaaagccagagcaataaaggccgcggccgcctttcttctaatatatttcttcataaccttgctgtctcccttgccttcactacgactccaccgtcagcataatctgcattcccgccgtacctatctctctgtccgtttccatgctgtacgccgtaaacgtagcgatgcagacatagacaccctgtggaaggtccacatcaagaggttttgcttccagatatttccccggctcaatcagtcccgtcttcagaatttcctgatccacgtagtctcccgccccgggagaatcgtccgtacctatcacggtgatcgtcaccgtgaacccgtactgatttccctggatattttcaatacgcacgtctccttccgcttttccgtcggcaaatacgggcgtcgggttcatggagatattaagacggctctccgccactttacggttcaaccgatcctgaatctcctcgtcgctcatgccgggaaggatgcccagctccgcatccagctcccgctgtattccggatacttcctcctcctgcttttcctgacctgctctgtacgcggaccatgccacaaccgccattaggatcagtacgatgagcgcatagaacagaggttttcccattttcttttcttccatctccgtccccctattccgatgtcaccacaatattcatggccgcctgcccaatctcttccagggtctccggatagagagcatgaaaaaccgcaataccgttatatcggcctccttccggcatttccattacatcccccgactcgatgtaaaatccctgctttatgattccggactgatatacctgctgcatgtccaaagtctcttcatccgtatagatatagacgtctgcctgcagataataattattggccgggacattttccagcatcacgttaatcttgccgtcccggatgaccggagtggggttcattgaaatgtttaaacggctttcatctataatacggttcaattccttttgtatctccgcctcgctcttgccgggcagaaatccctccaacgcgttcctgtcttcctcaaatttactctgctgtgcggactggctataaacccaaaaggccagtccccggttgtggccagaaggaccacgacggcaaagagcagcagtatgctgccggtttttatgcttttcttctttttcttcacccccggcatctgtctgttttgatccttttcgattatttcctccgatttcatgcgctctcctgccttcctcttacggtactgcaatgacgtccgccttgtcaggccctgcataatccttatccattaccgttcctgttgtgtcgatgcagcttacggtatacacgaggcgaaactgcgccgtcgggctggcctgatctacaggggtatatcccgttggcacactggcctctacaagcagcggcatactgttatttgccgggtcggcctcaccaatccgcttatagcttttactctgataattatagaaagatgaatcctgcagggtcagatccaccgtaatttcctgggtggaaccaaccggcaggccgggcagaggaacacctcctatgcttagctgaatctccttgttcgttgtatcgggtgtaaaatccgttacaagcgcccagtcactgccgtccactcttgctaccttaagcccggttaccgccatggagatattcctgtcaggattcctgatggaataagactcactcggcacaataaccgtgttcgttccgttttcttttgcaacgcacatggtcaggtataacgggacttcgaaggacacggcctcgggcgccatctggctcactccaagggacagctccgtccttccggccgtacttcctgatgcgatcgccgtaatctccataatgtcaaatgacgctgccatcgtcagcgccgccgcggccaacatccaactcctctttctcttgctcattcctgtatctgacctcctcattagtccggttccttccctacagtacagcctcccgttatttcggggcccagtaggagatattacagagtactcccttatttatgggagtactctgtaatatgggatttatggagttgagaagcctgctgccgtcttatcatcgccgacatagacggaaccaagggcctcgccggtaccgctcaaagctgccacggtatatgtaatcttaaactgggcggccgcctttttatcagtacgagtatccgctttaatcgttcccagcaattttagccccttcggatcaccgctcagacttgctccgggtgcgatggctttcggttttcctgtgtctacaaaggccccggacaggggtacctccttcacaccgtctgtcttggttacggccggtatatcacagccgccgatactaaaaatcatttgtgtcattgaattcagcggagtaccggtgtctacaatttcccagtctcccaatgcctgaatcttcatggatgtaacgccgatgtcataggaatcagcgccggcggctgccgcgtttgaaatgtcatatccgtccggcgtagccatcgctgcatccccggattttgccgccattgtaacgtaaagaggcacttcaaacttgacgtttaccgggcttttccccgtctccataataccgattgtagtatgctcatctcctgtcgcgttgttcgttacggtatttgcgaccgccggggtcaccgatgctgcggaaagaactgccgccatcaccaatgatgttaatcttttcttcttcatacatttttctccttctttatctccgccaacagatatagccacctgtttttatctgtgaatccgatggaacctgctgccggaatttatttttatgtataaggcggtaacgcctcaataccgttatcgcacccgtctccgggcgcagaggctgccacaggccgcgatataacggctgtgctcctgttgatttcagcctccgcctattgtgataatcaggcccgtctccacgcttccggccgtcgttcccgtcccgggatcgatggcgtatgccgtggcggttgcaggatgctttcctgtttcaaggacttccttaagctcaccggtcatctcctgaccgccgggccttaactcacggctcctgtaaagctccttcccgctgccgtccgtgatgacgaccagcatatagaaggtattttccgggctgtttataatacacaaatctccttccgcctccggcgaagtgaaattcggctcgctgttaatcttaaaacggaaactgctctcctccgcttcctcccggatctgctccaatattgcctccggatccggcggcatttccttttctccggcaggccgcgcattggtatccatctccatagcggcatacttcccggccgcagtccttttccacaggaccagactgaatgtggctgcaaacaaagcagttatcagcagggccatggaagccccggccatcttttgccggtttcttttatgtctgcttgctctcatggcatcttccacctccttcttaaggcgcagcagcaggcacgacggtaaaccgatatgaaagccggcccgtcattccgtctgcgcgggtaggctggatattctcagcatcatagactgcataaaaagtaaaattcagcccgtgggtccgggatgccgccggctccataatccccatatccagcggcgtggctggtgtgatgccgtccaatacgttcctggtggcaaagtttccgatataatcgggatcactcgggccagaggtccgataagcagtcccatctcattgccgctgagcccctcctgacggttcaccagtgtaatctctttgccggatgacggtgtggtatcttcaaaggacgtaatttcgacttttactctcgattctcccctgtttgcaatgtaacatacgggagcgagcagcttcggagccggcagaggatctcccggagccgctttgagcgccaccatcttaaccttcatcggcacatccacatcaatcatcttgtcacctaccggtatcgcaatctttaccgtattatttaagttgtcttttgcatagacccacactaccgaatctttcgtcaatgcagttccgggaactctaaatgtgtaattgccttccgttccgtctatcaggggcggattaggtattgccgtttcctgtatcccgttctgatcgggcgcggctgccatcagctcttcttttgctgccgcctcggccgttatattgccagcggcaggcccaaccgcccacgcccactgtttgacaccgtgagccgtataggacagatgagaggccgggtcaagcgggtccggaggcatccagtcaaccgtcatgtcttttactgtgacgctgaagctgtaatcccctgtggcggggtcatagacgacggtaacatccgtcccggactgtgacggtgcaagggtgtccaggataaccgtggcaacatttcccatcttgtccataatatgagcaaaatacaaggtttcctgttttatgaccagtccgtccagccttccgtccgccgccgtagtaccaggttctccggtaaaaacaatctcctgtgcatttgccggcattgtatcttttgttccatcccagccgggatcatgtcttgtgtacgccagagattggacgggatctcccgccgcatttctaggcattccaatcacataaccgccttttacggccacatcgccgtcataacggaagacaaggttctttctgttttcagccgcatcggccgtatcaaggccgtcgggatattccacccggaccatggtggtatgggtcgccggttttgccagataaatataccctttgctgttttcggtctttttcatgatattgtaattgctccgcatattctgatacttgagcggatccgcctttgacggatctgcaaattccaatatgatgtctccagcggatactgtttttccgccggacagggagagatccactttaggacctgtaatgtcggccctctcatcgatttgaagaggtatcgtcgggccgccgtccggcttattaatatgaatatggctctccagggttcccccgattttaacactcctacctttcctgcatctgttcctgtcaattccagctttgcgttgaccatattcaggataccggttcttttgtttacccccgcaaagggatcgctgtccaggttttctaccaccagcaacagatgagacgtatcggcagcgcttccgatcataagctccgtaaagcccttaaccgtattgattgccacggaagtggctgaggagggatccggcttggtcagagtcaccgtcctggtccctccaacgtcttcctttaatactcccgttgccgtggattctactccgtagccgctgacggttccaatccgatccgaatcctccagtaatgtggtactgagatctatcgcaatcgacacattcccgttcacgctgccgctgcccgcaccgcctccgtagacatccagtttttttacctctttcatggaaccgaccggatcatcctttacgtctatctcacaggaaccgaccgaagcgtttcctgctccgtagatccgaattggtccccaggagccggctcccgacatttctattctgactttatctaccgtggttcccgacattcccccgtaaatctctaacgcaccgccatggcctcctgccgcttcagttccaaaaaagcctccgcgcacctccaagctggccgtctttgtcacatttcccttaccgcccggagtgagcagatttctgacttttgccatgtcgcctgaacctgtggccggtaagattacactggtgcttccgtcgactgaggcagatgcctggctcccgcctccataaacagagtcaaaagtaccgctcattattttaaggctggtatcaccaacaatagccgtcttaccgcccccatagaggtcgggatattttccgctgaatggtacaatttcagtctcaggcccgattgtaagatcatagccgccggccagtatatccgccgccgcagtgaaggtgagcctgatcttagtcagctctgtgtttgccccgcattccagatcccctcccagcctgacgttccgtttaaccgtctggccaactatttctccgggcagtatgggatcactggccgagagttcaaaagtgctggtaaacgtaattttagtcgcagagcttccgctcttcttaatcgcagccagctcttttgccgtcaggcggtagccttcttttctgaatgccagttcatatgagtttccggtgctgacggttcccagagcatctgcgaccgattcataataagaatgctgccctccgttaactgagagggataccgggtaccccaggcccacggtcccgtcgtccgtgtcggccatcaaaccaccctgaatcgtgctgcctgcttcgattccctcggtagtagcccgatccttccgggtaaatcttaacaggatatcattaatctgagcctgatccgttcccgaataccccagcaggatcgcagctccatgcttgacgtccagcggaagatttacatcatccagaaccaggggcgtcgtaacaaggcccgaaccggtccgcttcagcagcagttccgcggttcccgttattatcccaagagacccaacgcggttgtccgcctcaaggaatctcagaatggagcctgaccccagttccagctttccctgataatccatggtatccgactgacggtagttcagtttgccgcttacggtcacctctgcattctgtgcaatgtttacctgatcaaagttatagatattgtcgattgcaagttcactgacggcattgccgaccgtcaattccgcttttcctgtcggcttgctgttgtcgcctttcatgcctccgtaaagcgactttatggtgcctcctgtaacattgacactggcattggccactttcctatcccgtcctccgccatacacattttcaaagactccggaacggatggtaatactggcatcgccggatagatccgtcagattgctgccgccaaaaaccccggtaaaagggttgttatccacaaatgtcacattctcgccaaaggtcaccggcgtgccgtttgcatagaaatattttgcctcatcaacacggaaagcgatatccttaaatacaaccccctttgccgctaccggcaagttcattgcggggctgccgttccggatcctaagccttctcggcgtgccgtccagggctgtgtcagaagtgagcgtgattatgccctggtatccgttcagctctgcccatgcatcccgatcctccttcgtcagcgcatagtccgtcatcagctttaccgtgacgtccggatcgccgcttagcgacgtaataaaatcaatcgcctccttatgggtggaaaaatctcttatgtcaccattggcctcattcgtaatccggatgggtttctcatctgtaaggataatttcccccgtctgcctgttggccttaagattaaatatcttagtgccggagccctggaccgcattatcgattctgctctcaaaatgggtcgcatcggcattggacggatccttaaacttaactatgacatcccccgctttgaatggacgggaagttgcgtccttatttttctgcagctcttcaaatctctgtacactggtggaaccggagccattctgatccagatcatccagaattaatggcccgtttctcgtagtcatgcggttgtcgattatgagcatagggttgtctgaatttacatctctgttttgatggttataaagatagagcgtattgttaagtccggcgacttcaaggtccctcacgtttgacacaagaggcttcccctcctccgaccagctgaccagtttaagctgggaattatccttcacaaaactcaggctcccgctaagcttcagccggctcgtccacagctccgagttattttgcatatttatggaagcgccttcgattcctgtcggtgcgttgagaccgcggttatatcccacaaagctctctctggtattcgcatcaacatctaaagccagtccgctccctgtgagagcgccgccaaattgtaccctgtttctggtattaatatatacatctgaggtatccggcctttgtctgcttacgatttccgggggcagcttcactttatcgaagtacaagcggttgctgagttccaaaaagtccgtagtcccgggcggaagcttaaaattaatttctattaagttaagggaggttcccgctgatttcgctcccagcgacagccgttttccatccgtaacgatggttccgttccgcaaggtcgtagacagtccgctcctaaactcgatatcttctgtaagagtcaatgtcttatccctaatgattatcataaaagtgctcaggccgctgccgttcatccccgggcgcactacctctaatagattgccggccgcaccggttccgccaagagtgtcgtttttacccatttcaatctggacattgtacaatttcttatatgccgggtcgctggtaagccgttttatcacctggccggccgttgtcccgccggaagctttcggatccaggtcgaccgcattcccatactctaccggtgcaatcgtgtttaacaggtaggagataacatgggtagccgcctcagtggcccggatgtttcgcactgtcgtgatctcgttcccccctcgtcctcagacgcaagaagaatctgatacgactggtcttcctgcagcggcgggtattccgcttccgtaactgctgcggccctgcgggaacgcatgccggcaggctgttccggaaccgcatcggacatagtcgccggccggggtacgtcgtccggcagcgcgttctgaggatttccggtagtataaagtgacgacatgtctttaatacggacttctgcatgctcgattggctcgtccttttcatcccttacgacaactccctccaaaggatcgtaatccgtcgtattggcacggacttctaaatcaggagcatagatataatatccgtctttaatctccacccggcgtttgcaggtgaactcctctttgctcaccggatggtcggcagccaataccacgctgtatactccctgcttcagcttcgcgttctcctgccctgtctcttcatccgtaacggttactctggctgcatccagctcactgtcgtcttttaccttcaccgggaccgtctggccatcgtcactgactgcgcgcactccggagagcagatcaaagcccgtatttcttgtccccacaaacagggtgggggcgtcgaacaggatttgttcccctgcttctatcgtcacataacggacgtcggttaccggattccccgtttccggatttgtggccgtcagcctgacagggtaagtgccgggaagcaggaagacctccgccttaccgtcctcattttcctgaatctttacggcagcttgtaaacctgtgtcgtctttaatcgatacctctatatcaggctgccgctcccctttaatgtccgttacataagcatcttctgtcagcaggtcttcgcctgttaagactaattcgtacttacggtttttcctcttcttatctgtttctccatgggagctttcgtctttgatttcgtctgcatcgcatgcagtcgccgcgctgggagttgcagagttttcctcctttgataccaggctgtacagctcggcgtccgccggaatccgcagctcttcgttttcatatttaatacacagctccccgggaataacgcgcactgttcttttaaaatagattacgccatcgcctgtatccaggctgccgcgcccgtatgtacccggtttttccagtgggacttcttctgcatataccgtacccgtcaccctggatatagcttcggctatagccggcataacgtcatcggagttttcctgtgagctgctgttctgtccgctgctttcactttgggttcctccattatcctggcttcctccattatctccggtttcgccttcttcctggtttccgccggttccggtatccccggttccgtcttcttcctggtttccgccggttccggtatccccggttccgtcttcttcctggttttctccggttccggtatccccggttccgtcttcttcctggttttctccggttccggtatccccggttccgtcttcctcctggccccctccggttccggtatccccggttccgtcttcttcctggctccctccggcgtccacggtttcatcttcctcccggttccctccggtatcggtatccccggttccgtcttcttcccggctccctccggcgtccacggtttcatcttcttcccggttccctccggtatcggtatccccggttccgtcttcttcctggcttcctccggtgtcttcgttcccaccgtcttcctggctttctccggtattgtcattctggccgatgtcctcgtcattctccgcctccggcggcgttgctttatccggcgaagggcttccgccaccgcctccctccggtttttcttcatccggttcatcatcgaaaacgggcgtaagggaatattccacctcgtacctgccgggtatgtctatatcgaagtctccggtatcaaccaggtccagctcgtaatgatccgaccgatatgtaatcccttccatcaaatcatattcatccgctccctgctccaaacgcagttccggcgctttatagggtctcatttcctctgcaagagcccctccgattgtccctccgaccaccagtagactcaacagacccatcagtattaatctgcctcttttgttcctcatatgcttcccttgcctttactcatttgctctttactcatcttttacggcctgctccccaaatacgtatatcaaaaaccgtttcatttcatcttccgggcaggcatccggcggcaatgcctccagttccttcctgaccgcgtccttcttcgtaggcaggcaggaaatgtaatcgcagccaatccgctttctcatttgttcaaatatatccattcattcacccaaccttataaagattacccggccggcagaatgctgccgcaaaccgccggctaaatacgacatacagcttccactgatgcctgcgcatccaatatggaagctgctttctgatatcgtcctgcatgtctaatgaagttacgcaaaattttgaggttaaaatgttgacatactacataaaatattctaaaatcagaagcaccaccaactaatttcaataaaatttatgtatattttagtttcgcaaaattttgcgcaactgtatttttaattatacataatattttgcgcatgtcaagcgttagcaacgcaaaatttgaggtataattatgggattgtatgaacgaattcgtgatctcgccaaattaaaaggatactcggttaaccgattggaacaggaattaggatttgccagaagctcgatcagtaaatttaataagaataagccaagtgttgataagctccggaagatatctgattttttagataccaccatggaaaacctgatgggtacggaatctgctgaaaatgatcaacagggggctgattctctttatacagcctcacaactgtattccggcagttcaagtgcggtccgattatttgagtcggaagaaatgattaataaatatcgggaatccggtacacgtgatataaaaatttatctggattttattttggcccagctgactgccggaggaacggagcctgcattttacgacggagaggcactctatccggaaactgccaagctgttcagggaggatttgctgattgccatcgaacggcttaagattataaacaaagctaaaagcatctgtgaattaaaaaaagattagaaggagagaaacggtgccgcataccggctgccgcttctttccttctgatcttttttgctctctgtttatcttcaatgcatctgaaacttttgcttatcgctcaggcattgcaggttttattgaatactgcttccgatgcctctggatccactttacaatttccaccgccggtataattaaaaatgccagcaaaagcgccgtaatatattccatcagtgaaatatgctcaaagccgaatgccctggaaagaaacggcacataaatgacaagtgtggtcagcaccagcgagaacagcatggcgccccacaaaaccttattatgacctttcaggctgaacactgattttctctgtgagcgcatattgaaggaatggaaaatttccgtcatagacatggtcagaaaggccatcgtaatgccatcggcactgggcgcaatctcccatatcccggactcgatccggtggccgataaaataggctgccagtgtaagcgccgaaatcaggattccctggtaaattacgtccgtccccaggccgccggcaaatattccgtcctttgcctctctcggcttccgttccataatatcatcttccgcctcctccattcccagagccagggccggaaagcagtctgtaatcaggttaatccacagcagatgcaccggttttaaaatgacaaagccgagaagtgtggccacaaagacactgaggacttcgctcagattcgaggccagcagaaactggatggctttgcggatattatcgtatatcctccgcccttccctgacagccgccacgatggtggcaaaattgtcgtctgcgagaaccatatcggcaacatttttcgttacatccgtacctgtgatacccataccgacaccgatatcggcatttttaatggaaggagcgtcgttgactccgtcccccgtcatagcagtaaccattcccttttcctgccagccctgtacgatacggaccttgtgttcgggctgaactctggcatagacggaaaaattctctatcttatcggaaaactgagcctcactcatttcatccagctccgctcccgttaccgcctggtctggggatgtgatgattccaagctccatggctatggcggcagccgtatcccggtgatcaccggtgatcatgaccggcctgattccggcctgacggcattcctggattgccgccttaacttccggccttaccggatcaatcattccggtgagaccgataaaaacaagcccgcgttccagggccgccggggaggtatcctccggtttcagctccgtctctttaaaagcgcctgcgagtacccggagcgctttatctgccattttcttgttttccgactcaatccgttctctgtcttccttcgtcataggacggactgccccgttttcccagatagaggtacagcattttaatacttcgtccggcgcacctttcgtatactggataaacaggccttttgcattacgatggacggtcgacatcatttttcttacggaatcaaacggcgcctctcccaccctgggcattctgctttgcagctctttttgggaaatcccaagggatgacgcataattgacaagggctgcctccgtcggctctccgacggcttcctccccctcctgcgcttcggcatcattgcagagcgccatggcttcggccagaagtgtttcatcacttcccgcaaattccgttaccgtcattttattctgcgtcagtgtgcctgttttatcagagcagaccacctgggcgcagccaagcgtttccactgccgtcagcttccggatgatcgcttttttcttcgacatattggtaacgccgatcgcaagcacgattgtgactacagttgcaagcccctccggaattgcagccactgcaagactgacagccaccataaatgtatctatcaaaacctcagtatgaaaatctccggcccggaccagactgaatatgaagatgaacacacagatgcccagaaccagcacactgagcgttttactgagctgtgtcagcttcttctgaagcggagtctggttttctttggccctggcaagtgcgtctgctatttttcccatctccgtatccatgccggcggccgtcacaacagccgttcctcttccgtagactaccgtgcctcccatatagaccatgttttttctgtcgcccagcggaatctcttttgccttattatccccggcctttgcgctgctgcccggagcttcgctctgtttttcgaccggaacagactcgccggtcagagccgcttcctcaatcttcagggatgcgcactccagtatgcgtccgtcggccggcaccgcatcaccggcctccagaagtatcacatctcccaccaccagctcttcactcttgatgctctgcatctttccgtccctgtacaccttggaaacggccgccgacatcttttgcagcgcttctatggctttttctgccttactctcctgatacactcccagtacggcatttatcaccaccacagccaggataattatcacatccgcaaatgattcccctgcataaaatgcagtaattcccgataccagcgctgcggccagaagtacaataatcatcgggtccttaagctgctttgcaaagcgcagaagcagagactcccgctccggttccgccagcttattgggaccgtttttttccagccggatttcagcctccccgctctcaagtccgtgaagggtgctgcctgtctctttgagcgcctcccggcgtcttccatgtaaaactttatcattgacctgcctccttaccattacgctcccgccggacggctgccgcctggccgaatcgcaacttctttccttttatctgcacttcacacgctcaggatccgcagcgccggcacagtatccgttattgggttattatgccggatccatacaatgattatgccccgcaatgcgaattgttggtaacagttcggccatgatgtattccgcgaggtgttttcgctgtttttgcgaaaatcccgagttatgcggcgcgacgcggtgaaaagtaaacttttcaccacaatcaacggcgtttttgccgtttctgtgcatcatttgttgcagtttggccgaaggctgaactgtaacaattgttaatgtccggctcctgtccgcatcagactaccgcgccggagcgcggctgctttagcggacatacttccttagcacaggtaccgccatcaacaaaaagactcatacgcagtattttactactgcatatgagtctcgtcatttaaggcaaaccaggcgttaacgccatgcatgttgacttgccgcacatatattctgtgtctgactactcccccatataaggaagaccgccgcaacggtatgttcgtataacagcagggtgaaaccgctctgatttcccgccgtgttgtcgtgctatatcttattcgcccagtctagcagaagttcctgcaattgtcaagtaaggcggagacgcttttggtatctcgcggaacacagccatgtgatcagtaacaaacttttacagtttgttttcagctaaccgccgaaccttcacctgtcagtccataaatcctttcagcctgatataagccttgatcagctccgccgtctcctccagagtcagcttcgtcgtattaatgggcagatcataattcttcatgctgtgccactcgctgcctgtgaagtacttgtagtactctttccgttccttctcaatcttcttgattcttctcttggcgcgttcctcatcaatacagtccacttccataacgcgctgtaccttcttgactttatctgcgtaaacaaaaatacggatcagacgttcgatgtcctcatcctgatccagaacatagcctgccgccctccccacgaagatacacggctcactttccgccagctcgcgcatcacctcagactggaatttaaacaggttttctggggaagtcagcttatcgttgggcgacggtttggattggagatcaatctttcttccgcctcccagcctatagagcaggttgttgcccgctttctcatcagccaggcggaaaaactgttcccccaccgcgcttttctccgatgccagtttcaaaatatcgtcatcataaaaatgtatccccagctcttccgccagcttctttcccacaatgcgtccgccgcttccgtactctctctcaatggtgataatcaaatttttgtttcccataaatctccctccctgcatctgatctgagtgttattgtgtgcagcaagccgctttttgtcatgctgtgaacagtaacatttttattaccgcttcagactgcggataaacgctttttcttctttatccacccggaaagactccgttatcttctgaagcgccttgttgtaagtaaaatcatcgaacggcccttccctcatgcatgcaagcgtcttttcaggaaactgcacatagcagacggacaaggcccaggcgaccgccatctttacataataccccggatggaccgcctgctgtaaaagctccaatgtcgtatcaatatagtcctcatctatataataatccaaaagcaggacaatggcaaacctggcttcaaattccctctccgatgaaatgtacggtttcagaaaggccaggacgctctccctgtcatcttttaccttcttgagtccggagcagacaatatcgcagtgagcccagttttcggccttcgccataaacgccggaagccgcttaagcatctgccctgtatcctcttttaaaaggccgatcaccatcccctgcagcataatctcttcatacgtatcatcaccggcacggccgagatatccgctcccttcctcctttaccagacgtctggccagcttccagagacgggggacccggacacccaggatgttctccgtccccggaaggagccggctgtgaaacaaccggtaaggctcatccgccaggagttccagttcttttctgacatccgtcagttccctgctgtccttcatcacagcgctcacatcttttcactgacacagatggctccgtaagggcggatgctcatccggtatgcattgccttctccgattgccccctcaatgtattccacatactcatcgaccagtccgtttggcagcataaccataattacacctgcaaacccgcctccgtgaatccggcatgcccccttttgcttctctttgataaacagctcggtcaatgccagggcaatgctgatcccctgttcctgcacgtttgccgtcgtatagacattctggagccatttccaggaagaattgcccgatgcggtgacatcctgcagaaatgtctcaaaatcgccttccctgagcgcctttacctgctcctccactctcttattctcttcaaagaagtgaagcgccctcatgacggagcggtccccggcataggcgcggacatcggccatctcccggataacatcctcttcggttatatctgcacacgcttcttttccaaagtaggccgccacttttctcatctccagaggaacggaggagtaatccgcgctcagatccgcatgccccttgcctgtattcacaataaccaggctgtaattctgtgcaccgaagtcaaagtctatcttctctacaaccggtttttccggattcttaaaatcgatggtaataaagcctccgactgcgcaggccatctgatccagcagcccggatgctttattccagaaatgattctcagaatattttccaatatgggagtaagtcaccacatccatcttgccgccgttaaaaaatgtattcagcatggagcagatcagcatctcataggccgccgaggagcttactccggccgcgctgatgacattgcttgtgatataggcgtcaaaaccgccgatttcgtagcctttttctttaaagccctgaagaattcccttggtcagatcgatggttcccgccatttccgcactgggttttaaatctttcaggctgatgataaatttctggttaaatgtctcgctgagaatgcggaccgtatctgtcccgttcttggccgcagcgcctacgcagtccaggttgatacttccggcaagtactttaccgtgattatgatccgtatggttcccgctgatttcagtacggcccggtgagctgaacagcagaatatcattatcaccgtatgtcttctcaaatccttttaccacctgacggtaacgctccgtattcccggcagcgcctgcctcaccgtaaagctctgccatcaattccgctgcttcctgcgtatcaagcttctgaagtgtatcctgtactgtcatgattcttctccttttccccattgtttttcgttatctacagtataccattccgtctgataagcctcaatatgatattctctgatttttctataaataaattgtataaatagtaacaactaaattccttgccgcaaacagtcgtatcctgtatactcataacagttcggacagcattgactgtaacatacaatcactatatcgcgggcctcagcccggccgatatgtaagaccaacaggaaaggcggtaaaacaggttaaaatggaaccatacagcccatattcatggggtgataagccctatcactccctcaactattatttaaaacagacattcggagaaaaaatatataaactggcgctggacggcgcaatgacctgcccaaaccgcgacggcaccctcggaaccggcggctgcattttttgcagcggaggcggttccggtgattttgccgagccgcagcatgccagtgtcacggaacagattgaggcggccaaggcccgcgtctcagctaaaataaagaatggccgttatatcgcctacttccagtcctataccaacacttacgcccctgtggattatctggaagctcttttcagggaagccgtctcccatcccgatatcgcggccctgtccatcggtacccgcccggactgcctgccgccgcaggtaatcagacttttgaaagagataaataaagaaaagccggtctggatcgagctggggcttcaaacgatccatgaatcaacggcagagctgatccgccgcggatatgagcttccctgttttattgatgcggtcagacgtttgaaagaagccggattaacggtaattgtccatgtaatcctggggcttcccggggaaacggaagatatgatgcttgaaacgatacgttttctggctaatcataccccgccagtggacggaattaagctccagctgctccacgtcttaaaaggcacaaaattggccgccctctatgaggcggccccattcccggtcatgaccatggaagaatatattgacttgattttaaaatgcatccggctgctgccgccccatattgtcatccaccgtctcagcggagacggtccgaaaaaactcctaatcgcccctgaatggagcggcaataaacggctgtttctgaattctctgacaagagcgctcagggagactggggcgtaccagggtgaatggcaccgtccccgtcaaccgtaatgtcaaatgagagagctttcagctcttcaaaaaactccggccattttgagacatccatctgccttgtataaccggcggaggatgtggccggaaccacagacaggacggcctggttcgcttcatccagctccacccggaccatcatggtctgaggaattacgcttccgaatacaaaattgccaagactgtataatatcggctttcctttataatactcgattccctggagtacatgaggatggctccccaccaccagatccgccccggcatcgatatactgccttgccagcgttctctggtattcctccggctgtgtattcctctcgattccccagtgtacatagacgacaaggtaatcgcactgcccctgtgccgctttaatctcattaaggagaatggaagggtcgtaggttgtcagtaccccgggatgggactttccggctgcccatgaggataccggaatgactctggaagcggcgagaaacccaatcttctttccctttgcctccatcacttccagctttttcgcctcatccaatcccgccccggcccctacccgcctgatacccgcaccgtccagcagggcacatgtgtccagcagggcatccgtaccgaaatccaggatatggttattagccaaagctacgatatccgggccgatttcctgcatgacattcatacgcgaaggcggcagacggaaggtatactgcttatcttccgcggcaattcccctctcactgaacggaaattcttcatttgccataaaaatatcggcagaagcaatctcgtttctcagcccttcatccagtactccggatattcccccggctctgtcatatgcgttcagaacgtgatccgacagatagatatcgccgcagaacaacagggacagctttcccgaatcaccggcgccgggcagatgcccgaactcattatccgatccgggcaggttcccgccctttttccccgtctctattttaagaaccggttcctccggcagaccttccagattctccccgccgtccttcccggcagggagcctgaagctgtcctgcagaccggagtccggctccctgtccgaagccaaaaaatgctccacagggacatcatccataaagcccgcttccggcctgctgttggctctttgggatatcaccagccagataagtaatgccgccagaagcaccggcggcaatataaatattttctttaaccgttttcttcttctcatcgtttcctcatatgatgaacacgacaggcagcagcgtttaaagagtcacaataataccgccgtctccggcgtacaccgtggctacccctgccgtatctgtaataacaatctccccgaatgacgctctgctgcacagcagttccttcacctgctccgctctgtcccgattattgcagtgggcgatgatcagccgcttattcttcgtgtcgcctccgcgcgaaacagcaatatcagccatccgtgacagcgccttgttcatccctctggcctgttccagtttcacaatcacgcccttatctccggccatgatcggtttaatattcaatgtagttgcaaaaaaggcctgcagtccggtcagacggccattctttctcaaaaagtcaagggactccaggacaaaaaaagtttccatggaatcgcggtagctctccgcctgcttcactacctcgtcaaagggaagctcctgttcacagagatcccgaatcttcatcgcgatattcagctcgccggaagaggccgacaaggaatccactacggcaatattcttatccttcccgtgttcctcctcgtacaattccttccccacaaccgcagcattataagttccgctcagatgactcgacagagtaatcacaaatatattctctgcgccgcactcaaaagcttctttaaacttttccggggaagggcaggccgttttcggacattcctttccgttcttaacgagttccagaaacgacttctggtcaaatgtttcatcatctattacctgggcatcgtctacctgcagcgtgagcggcaccatctgaaaacgggcatctttttttaattcatctgttaagtccaggcagctgtctccaataattttatacgtcataatattcctcctgtcatgcgattcgcatcacatagtattcattactatttattatagtaaccacatgaacgaaagtcaagcagttactgttcacagccctgcttatagtagcatggctatgccaaaagcaggtaataccccgccagaagtaaattcagtacgataaatacaacggttcccggattcaggtacatcgcggatgaaaaatccctgtactgaatcccctccggccagtttcccgggagcagccttgttttcttcacattgacgcaaaatatgacaatggaagcgataatcattcccagcgtaaccacgggaacggcacggactgctagcagataggaaattgtaatcgttttccggctcatcatcagaaggagcagggtggaatagctgttaaccataatgtgtaaaatacagttatatttaagcctgcctgttttgactgaaacataacccagaacaacgccgatggcagttgcatagagaatctgggagaggtttccgtgcataaggccgaacatcagggctgaaaaaagaattgccgctttttcccccagcgggcgcagccggttcaacagcttccagcggaagatatattcctcaatgaccggccccaaaaccgatacatacagaatcaccaccgggttcaggctttcaaacagattattgacgggattcatattataagtgcttctgtttgtcaccgccgccactattatattcaggatattgcccacaatattcagaatatatccggctcccataatcaaaataaaaaacatgaaaaattttcccggacgcatcctttttttctccggtaccacctccggcacatgttccataacggcaaatatcaccggcagaaccagggcataagcgagcagatgggctccggccgttgaaaaccagcctgaattcaatatcttataaagctccgctcccactcccatcactttatagtaagacagaagataaccgataagtccgaaaaggatgccggcgatctgtgttaagagaaccagtgccaccagggaccatccaagtacagaacagatatgctttacctcctgcctgtattcctgaacctgactccagttataattgctgttttccatatcataatctcctattccgtatgcgccactgattatagtatagcgattttcggagccggagtcaattcgggcagctatgtaaatggagatttaactgaggttggaggacgcgtccggaacggaccatgtccggtgtggtgagggggatggctgagtcttccgtccccggttggagggtgtcctgagggggaatccggccggaatgaattgctgcggggaccgtttgcactctttggagtgcgcatcggagtgctaagctcgaaaagacctcgctaagcaccggcggcgtcctcacctgcttaactaaatctcaaacgataacctgcacgctccgatcacaggtcaccgccatcaatcacagcaaattgagcggaattaaatccggtgatattcttccggccttaattccgctcaatcttttatgaaacatcatataaagcaaatttccagcaaacatactctaacaaatactttatcccatatccaacatatatcaaatgcatatggacgcgctgagttgcctcgacaaggtccgccccccgcacttaatgcgtaagactatcagcggccgcaggccagtggacgggcgatacccttggccttgagtctttcgtcccggcgaaaatcttcgcccgcagccccataccacaacaatcttcccccgagacgaaagactcatacccccaccccgtccgctggccgttccggcggcgtcctcacctgcttaacagggctgccaagtactacagagtcataaccgcttttttctcaggggaatatccccctgcaggtatacgattttaccattcagcgccgtcatgacaggaacaagaagagacgtccccttcctgacgttaccgtcggagtctgaaaattccacatcctgttcacagactttgagaattgtaagatccgcgatcctcccctttttaagaatacctgcctgcttctccatgccgagacagcgggcgggagtccgcgttaccgaatcaaatacacggtgcagaggcattcccatgttccaaaacttggacattacaaacgccaaatccttcatggcaggtgtgttggcaaatgtggccgccgtggcgtcactgcttatgatgtcgggataaaccccgtctctcaccgcctgctgtgccacctcaaaattaaagttcatccggccgtttcccacttccaggatgacgccgcgtttctgtgcctttttaaatgcctcctgtacgccgccgtcttcctttagaatcgtcatccctttattgtggtacatatggctgtatatatctcccggacgcaggcggctgacaatctcctccgcccggaccggcggatctgttgtgtggacacagaccgggagcttccagcgctcccccagttccagggcatgctccaaaggtgcaatccccaaatcccccacaatcgatcggctgattctgactttgatacctctgatttcatcggcatatttcgtgattagttcctccatcagcccttctttaacagccgccctgtccagaggctcagaaattccggctcccggctgcccaaccggcgaaaggttcaaaaagctcctgatattgattgtccggggcaggatatccgtcaggcggaatgcttcatatccggcacagccggctgtccccatgtctacggccatcgtcacaccagatgacagcaggagatctccgtttaaaccgaatccgcttcccttggtatataaatgtgtatggaaatcaatcaatcccggcaggatataagcgccgcccgcatccagcagaatttcagccgctgtatctgcacgctcacctgttaatggttcggacagcccctgtatccttcccttttcaatccagaccgcacactttgtctcccggcctgtgtccaagtcaacggccaccgcattattaatcagtaaatccatgttcccctccctcagcttccggcccgaaccactaagccctgccgattcttctttaaatataaagcggccagatcattggtattataagtatgcacgcaatcagaaatacgaccgccatcccgatattgctcttcaggtaatccgagaacttgtaccctccatatgcataaatcagattggccgggggacacgcaatcggtgataaaatcgacatagttgaagcaatacaaagcaccatcagcagagcagacgggaatactccaatcgtctgtgcaatcgcaatgataatcggcatcagcagggtgatcgtgacaacgttagacataaactgtgtcataacgcaagtcagaataaaaataacaatggttatgtaatacacatttgtagaaccgccgataatgcgtatcagcatatcggccataatctgtgcggcgccggtattcttaagcgctgtagccagaggcgtcataccgccgagcagaattacggtcttgatgctgacaagctgatatgcctgcttctccgtaaaaatcccaaaaagcacgtcggcaaccgcacccatgattgccaccatataagatggtatgcctgtcctgtcctcaaaaatcattcctacaaatacacagagcaggattaccacggagaccacctgtttccatctgggtacatccttcggcgccttttccgtaaaaatctggctttcatcattgtatatcttgatatccggcagaaatttataaccgataaaatacatatacaaaagcattatgacggtaaggggaatgccgattttcgaaatctcaaagaatccaaacggctgtcccagttctttaatctgatccccaatcagcacattaaccgccgcatcgccgaccagcgtcagcctgccgccggccatagctcccagaaacgcggacataagaagcttagaacgtgaaaaactggtcgtcgccgtgattccgataataatcggaataaatactgccaccgtaccggaattgctcagtccggccgacataatcgtggataaaatcattatcgccataatcatctggcgttccgtttttgcatatttagttacaatcgaagcaattttgtcacatactcccgtttcaaacagagcgctgccgacaatcaccacgccgattaacatcagaatcgtcgtgctggcaaatccgcttaccgcctccttcggcgtaaccaggcccgtcagtaccagggcacacagtgtcagcataaccgtcatattgaccggtatcttttcaagcagaaaagatataaccgcaaggattaaaataattattgtcagtgtggatggttccatatttcccctcatttctttagtctgcaaaggatgcggcccccatggccggcctctgtcctttgctttttttgatggttcaattgtacgtgatccaatccacaaaatccaacaacacattttgtaagttttgacaaaataatattgtgaaaaacaaatcaggcgggaaatattcccggccggattattctcccgcctggaacgattcccgcctgaagttacggaatgttatttagccagcattcccataatctcattggttcttgctataaagttcgtcattctctccggtgtcagggaaccatggcttaagagcgccagatcgtaaagctgttcgcaaatctttgccgtgttttctccctcgccgtgttctaagacatattgaaccagattgttattcgcattcagaatcaatacctgtccgcttcctccgaacatggacggatccattccgtacatgttgtacatcttcatcatttcctgcatacggcgggattcctctgaaaccgtgatcatcgaggagatggactcatttttcagcttctccactttgacctgaagcttatcgtcgccgagcgccttgcggaatacctccgtcagggtttcctccgtcttcttaaacgactccttatcttcctccgccacttcttccttcatcgtctcattgacatccgcgtcgatccggaagaatttcaggttctcatgcttctgctccaggcggccgatgaacggattatcaatattatgcggcaggataagggcatcctggcccgactctttgaacatattgatgtactggctctgttctttttcgtcggtcacatagaaaatcttattttcgtggttttcttctttggctctttcttcgcagtctttcagcgtcagatatttgccttccagattcttgaagataatatactcatccattttgtcggcaaacttatcatccttgagacagccgaatttgataaacggagcaatgtcatcccagtacttctcatatgtttcacgatcggttttacacattccggacagcttatcggccaccttcttagtgatataatcagaaatcttcttgacaaaaccgtcattctgaagcgcgcttctcgatacgttaagcggcagatccggacagtcgattaccccctttaaaagcatcaggaactccggaataacttccttgatgttgtcggcgataaacacctggttattgtacagcttaatcgtaccttccaggctctcatattccatgttgatcttcgggaaatagagaattccctttaagttaaacggatagtccatgttcagatggatccagaacagcggctctttaaagtccatgaataccttgcggtaaaattccttgtattcctcctctgtgcattcattcggatgcttattccacagcgggttaatatcattcagtgccaccggccgcttcagaattttgtatttctctgtccgcggggaaatttcaacggtctcttttgtcccgtcttcattctccttttcctcggtcttagcctcttcaattacagtttctacaattgtgtccttctcagtcagctcatccttctcaattgtctcatactgcggctctgccgacgcattatccaggaaaatttctaccggcatgaatgcacagtacttctggattacttcacgcgccctgtattcattacagaactcgttgctgtcttcattcagataaagagtaatcctcgtaccattgcctgtcttatcgccttcgtccatggcaaattccgtaccgccctcggactcccagtgaaccggcttagccccttccttataggacagggtgtcgataacgactctgtcggctaccatgaatgcggaataaaagcccaggccgaaatggccgataatctgatcctcattggctttatccttatacttttccaggaaatcctgggccccggaaaatgcaatctggttgatgtattcttccacttcctccgctgtcataccgataccgttatcttccacggaaatcgtcttcgcattggaatccaccgttacctgaatcttatactccagctcctccggttttacaaattcccccatcagctccagttttttaagctttgtgattgcgtcacagccattggaaattaattccctgtaaaagatatcatgatccgagtagagccatttctttatgattgggaaaatattctcgctgttgattgataagctgcctgtcttagctgccataatgaacactcctttgctattcgtatatttgtatttcttttaattaattactttgtcatgctccgtgtaacccgggatgtgcggttgcgcacggaaatcccccgcaaaatagtggctttgaacagaaacttcaccatttctcagtccaccgggcatttattattctaatacctcatgcctcagatgtcaatagaaaattagcactcatttgaattgagtgctagtaattttaattgcatttcttttccattccttgcgtttttctttcagttttttccagctcgttgacattcaaagtcggaacttctataatggttaagtcatacaaaataaggaggactctctaatatgaatcacagaaaaaaactacagtgttttttgaaaaaaagcgctgctgtcggatatatctcgctctcactggccttttccagtgtatttgcgggaatcgcttatgccggtccggctgatgatacctctctgacgactccgtctccgggtccgggaagcgggccgggagctgaggttccggtagataacagctactacaaccggcgcctctccgatccggttgtaaaaccggtcgacaagtactcctatgaacagatggagtatgatatcagcgccctcgccgcccgctatgggaaccgcatgacaattaatgtcatcggccagtctctcgacggcaggaatatttatgatatcataatcggaaatccggctgcgccaaaaaagattctgtttcagggagccatccatgcaagagaatatattgtggttcctcttatgatgcagcagcttgaatatatgcttgcattttatgataccggaacctataatgaccagccgctgtcttccgtactgaataatgtagccgtccattatattccaatggcaaaccctgacggtgtcacattgagccagttcggcgaaagcgctatccgctccgaagagctgcgtcagaccatccagaactgctatacactggatatcgcagacgcccgcaccgccctgagctatgaagaatatctgacccgctggaagagcaatgcacgcggcgtggatctgaatcataactttgatgccggctgggatacgttaaatccgacactgaaccataattcctttacggactataaagggccttcccctctgtccgagccggaatcacaggcgctggcaaatctggcccagcagaacgcattctctgccgtcatcaattaccatgcaatgggcagagtgctttactgggatacggaaggaaaccagaaagcggcggaatcatacgacatggcactggccgcgtccggagtcaccggctatcaggtactcgccagcaaaggcgtcggcggttataaagactggctccagaaaaaaggaaatccggttccgggcctcacgattgaggtcggccgttccacctgtccggtcgcattttccgaataccagtctatctgggatcagaataagcagatacctgctcttttctgtaaatacattattacccattaaggtgaaagagggtgctgcagaactggataataccggttttgcagcaccctctttccgtattactctttccttataaaaagcaggaatgccgtaagagttcagacatcatgaactgttacggcatctctttattaaaggcggtgacctgtgcacggagcgtgcaggttatcgtttagtacggttttacggctgccatcaccgaagcggcagtctctttatatccatctgtgtaatctgcagtaaaaagaaccaggtaatcaccggatatcctgatataatattccctgcctgtgccttccgcagttttaccggatattgcggtataagtattaccgtctcccagtacggctcccgcctctgtcttcacgtctccgtatccggcagtcctgagcaggttcacataataatccacataattctcaagattccatccatcctgttttttcatgaatcccatatcaaccgttgccgcggtcagggcctctcccagcgggctgactctgactgtaagcaaatcttcattcttatctttatatgcaaacttcgccggtgccaaaagctccagacggtaacccagccactcattggaataactgtggtctgtcagtgttccggcattcccggcctcattcccgttggctccgacgttcctcgactgcacaacgccgtctaccacccaggatccgtccgggttaacctgatgtccgtccggtgtctgcgtattcctcatcatatatccatactggtcaaaataatagcattccgcaatctgatcctgattgccgtccagccattcccagccgttggtgacaaatgtttcatcgtccctctgccatctccagcccgacggatccttctgccatcccgccgcataagccggaaaagccgtagtcatactgaacatcaccaatgctgccgcaaataattttttcttcatatcgttctccttgtctcaactgatattaaaacgttttaatagattgtgtctgaaaattgttttccgtcagatatgcgtcacactttgtgggagatttggcccgaatgagcgcggcgtagtgggctacggtaagcgaatttgggccaaatatgccgcgaagtgaggcgtgcagatggcgggaatggatttttatacaggctctagccttcctcaaaaacaatttcctctttacgtaaaaatgcctttactgaatcgtcccattccctctccagcgatctatccattgtaaactgattcatggagagtccggtgacacagtataaaacctgatcctcatacctgatattgataaaaagacctccgacctgttccggcagccaggatgaatttctgtcctttaaaaatttttccgtattgtccggcggtaatttaaaaacaattgcaaagctctccggcagcttgctgcctttgattaatgagaagcaaaatggacgcagcgtcttccatgacgagtaattttcaatttttcccgcctccagttcctcttcggagtaatacccctgtctcaccctgccgtcgatggtgaagctgttaaacgtaacgatactggcttccctcaccagaaaacggtcgaatgtttccccaataaataattttttcgtaaatactttcatatcttcaattcgtaatgcaaccataatttccctccatcccctccattctgtggcagtttcgcactgtcctatccattctaccgcaccctgggagttcatgcaacggattttctcattactgtatggagattaattaagcaggtgaggacgccgccgcaggccagcggacggggtggtgggatcgggttatgagtctttcgtcccgggggagcggcatagctggctggagaggagataccgtggttttgtttgcgcagggcggtgccggaagatgtcggcattatgtagtggccgcgacaaggttcccaccccctttgagactggagacaatcagcgtccggagcggaccgggtccggtgtgcgaaaacctccgcctgagtcatccgtccccggtgaaaacctaatctggggaagtaggcggaatcaattgcggaggggacatgggagtccgccggtgcttagcgaggtcccttacgagcttagagccgctgcgcactccaaagagtgcaaacggtccccgcagcaattcattccggccggattccccctctgcgaccaacctcccacagggacggaagactcagacagccccctcaccacaccggacatggtccgttccggacgcgtcctccattctcaactaaatcacattgcatattttcctgctattctttatacttgtagcagtaccggcggtgggaagcacgctgttttctccttccgggccggccataaaaattcaaggaggattttcacatggattacaatttatattcgaaagacattgaggaactgaccgcgcatttaaatgccggggtttctccgtttcatacagttcagtattcggcagagcttctgaaggggcggggctttgaagaattgaagctggatgccccctggttccccaaagccggcatgggctattttgtcaacatttttgacaccacgcttgccgctttcgtgatcggcagggatatcactgccgccgaatcaggggtgccgtccctgcgcatcgccgcctcccataccgactggccctgcctgatggtaaagccgtcccctgagctgacatgcggctcatacgcaaaactgaacgtatccgtatatggcggaccgatacttaatacatggctggaccgtcctctgtcgatggccggtaaagtatgcctgcgaagcccggatcccttccagcctgaggttctgctggtagacttcgcccgcccgcttctgaccgtgcccaacctggcaatacattttaaccgtgaagtaaacaaaggggtggaattaaatccgcagaaagatatgcagccgcttctggctgttctggatgagacattgaataaagactcttttttcctggatctgctggcagaagaaacaggctgcagtaaggatgatattctggattatcaattttacatttataactgtgacactccctgccggctgggcattcatggtgagatgctgtcttctccgcgccttgacaacctcacctcggtccatgcctgcctgagcgggatcatgaacagccgcagggaacacggcataagcgccgccgtcttatatgataatgaagagattggaagcagtacaaaacagggagccgcatcaccgcttatggaacgcgttctggaaaagctttatctgagccttggttacggccggagttcttttctggatgcattatttggcggattcctgctctccctcgatgttgcccatgccctgcaccccaatcaggcggaaaagtatgatcccaaagaccgcatcagcctgaatgagggcgttgccctgaagctggccgtatcccaggcctatgccacagatgcatcctacgtcagtgtcgtcgaagagctgtgccgccaaaatatcattccatacaggaaattttccaaccgctccgatatcagaggaggttccactctgggaagcatctcctcctgtatgatgaccatgcctgccgttgatgccggggcgccaatactcgcgatgcattcgtcacgcgagttgatgggcataaaggatcagtgggcgctggcgcagcttaccagggcattccttgcatagtataaaagctgaactgttacgctgaacggcacgccccgtctgctccctgcctcaatgaaacttcacctttaggatccgctccaccgactgattaatccgttcctccgagagcgtcccgttttccaccgccgtcaggactccctggtatgcctcctgaaaattttccggcatcagcagcatgtcattccccgcctgcaatgccctgacggccgcatcagcggaactgtatgacgaggtgactgcccccatattgagggcgtctgtgatgatgataccgtcatatcccagggtcccgcgcaaaatctccgttatcatctttggtgacatggatgccggcgtattgtcgccggtcacggcaggcgcggcaatatggccggacatgatgaaccgtgccccggctcggccgccctccagaaagggtacaaaatcttccgccatcagttcctcgagcgtacgttctgtggctgcatatccgtcatggctgtccgccgttgtgccgccatgccccggaaagtgcttcaggacagcgcttatgccatgagcctgcagtcccttgaccacttcgttggaaaatgctgccgtcacagctccgtctgttccgaaagaacgcctggccacaacggtattctccggattggtcagcacatctgctaccggggcaaaatccatattaaagcccagatcagccagataagttccgattttatctccaacttcatatgccttctgcggttcacccgaggccccgatctcactcatatcaggaaatgacgcaatgccaaattcttctcttccgctgattctggaaacctgtcctccctcttcatccaccgccagaaaagcttcgattccagtattgtccctgaaatatttctgtgttctcgtgagcatatctttcacctgatccggtgaacgcagattctgcttaaaatagacgattcccccgaccggatattcgcggattgattcttccgtcttagctccggcagcatagacctcgtctaccccggtaagagcctccggcgtcaccataaataattgcagcaccttttccctgagtgtcatctcttgcatcgcttcttcgactgtcatcggcgttttcccttccagattttcttcagaggcagccgaatcttttgccgcttcgtttctgtcgtcaccggggaagtactctgtcaccacagcctccgaggaatccctcgttttggccctctcttcttcctgcaccttcagatggcgcagaaaaaacaccgaaactgccgccgccgctgccgcaaccagcaatagaacaagccacccggctgccgggcctctctgccgtcttctgcttttcggatttcttctgctctgaccacgttgacgttcttccattctctgtccagcctttcgcccgttattttcctgaatactttctgtaaatttcaaagaaatccgcacctgccgcgtaccgtccggacccaagctccagcttattccagggatcccccgaataggtcaggttgattccttcccgaaagctgtcataaatctccttgaacgcttttctcttgcgttcctcgaagatgattttctttcttgccgctgtagcctcttcatcataatcgctgatgcacttaatcacataataggttccattcgactcaatcacctggctaacctgcccggcagacagcgcaaacgccgcatcttcaaactcctgggattcttcctttctccccagttgtctggtagtggcagacaggcctgcatcactggcgcatttttcaaaatccgcattctcctgcgccgcagccagactgaggttctccgccgcctgtctgtcggctgtttcagcctgcatcaccgtaataaccttcgcctcactgtcactgacctccagatctatgccctttgtcagctcctccaccagcttctcagccaggcagtaatcttcaaatactgctctcacgtcctcctcgctgacacccatatgctcgatatcttccgcggtaagatttccaaagtattccgccgctgccgccgccatctctgaacgctcttccggcgaaagtgacatattcctgtcctgtgccaggagattcattattttcagctcttccataaaatttttaatctgtccggtcagataagaggcaaaattctccccttcctccgctatctccacattccatatctgatccgtgcagatttcctcatagcggttttgctctgtcatggcaatcaccatgatctccggaagggaatatcccttctcactcttcctgccggccggcatagatgccccctggccgcatccggccagaaataggaggcagagggccagaagcagcaccggcattctaaacggcgccgggcttgttctgtttctatttccacatatcatattatccaatttcagctcctgtcgtgataatctaaaaaacaccgttgattgtggtgaaaagttataataataatttcagtattttcatgactccgtcatttacattgcgatctgcctgaaatctcgcggcattcttaacctcatctctggcatttcccactgcaaagctgtagtaggcccgtttcagcatctcaatgtcatttaactgatcgccaaatgccatcgtctcttccggcgcaatccccagactctcctgaagcgtcttcaccgcctcgcccttattgacttcagaagccatgcagtccatccacatgtcccccgacaccgtcatcttcagccggtcgccgtacttgttaaaaaacccttccgtggcatggctgatcccgtcttttctgtatgccgctactttgataatctcgtcatcgactttcgtgacatcctcaacttctataatgttgaaatgatatcccttcgtcatccagtcgataaattccctgtcctttgtctccagataagttccctttgccccgctaaccatcacttccagctccggatcttttctgatatccactgcaatggaatcagcaagcgcccgctcaatgggataaagaaaaagatttcttccgtagcatcccagataggagccattctccgccacataaaaaatctccttctttatgggtgaaaacgtatattctatgctggcggcctgacgcccgctggcagccgcaaaatgaatcttctttttctttttcagttccataatgacatcaaaaatctccggattaatctgattttccccgtcttttacgagagtgccgtctatatccgatacaattaatttaatcattcctgtcctccaatagctgtttcatttcctgatacactcttcctgccggaagtcccatcacatttgtgtaggaaccgtcaatgcctctgatatatgcggcaaacctgccctgtattccatatgctcccgccttatcgtccgactctttgcaggcaatgtagctttcgatttccttttccgacatcgggtatacgtccaccctggtttccactgcaaagcttctttttttatttccggctatcagcgttactcctgtatacacgtaatggctgtctccctgaagcatccggagcattcgggccgcatcggcttcatccgccggttttcccagaatctctccgtttgcatagacaacggtatccgatccgacgacaacggtcgtttgggcatcggtttcaccaagcctcgcggcaacctcctctgccttttgcctcgacagctcggttactacccgatccggctctttctccgtcactttttcctctatctcgctcggtatcacttccggtataattcctatctgccggagcagttcttcccttctcggcgatgcagaagccagcactactcttatattatccatatcttcttcctgttctcccattgttggttatcgttttatgccttgccatcctcttatttataccataaaagcccctctgaacacaagggcgcggacaatgaaaaggacgcactccggaatcttccgttctgcgccctaaaccataccttattttataatctgtcaactccccggtcaatttatcttcatcctgccgattatctcacggttatcttcacaattcttttcacgaagttccagcctgaagctgtagaagaagtcaaatacatagaaaaacagcagcgccagggccacatatttccccacatgggaaggtattctcgcaaccgtattctgcacctggacattcaggatccggaagaagataatacctaaaagcccccatcccaggctgctctcaaggcagatgatccctttataattacacctctttttactgtaatcccaccagaatgctccgaacagacgaatcattattttcgccgtgataagctccatcgttgttgccatcagcatactggcaaaataaagctttaccatgtcatcagaaaccggtctaagtaaaacagccgccccaacggctccaaaaccatagataatgcaaaaaggcccatgaccaaatcctcggttataaacaggtttcctgttttccaccgtcagaacaatacactccagaatatagccaatcaggctaaaagtaaaaaaacagttaatccagaaatataaatctactgtagtcttcattcgcaaattcccgtcctttcagtctcgcatcgttgtcccctgccggaaacttcctaataattttttccagtataatatgaattaatacataaatcaataatgttgtagcaattttttaacaaccgccgtcttcaacaaaacagaaagcccacaatgtgagctttccctgttataattattcagattaaataaacatcggatccataaccacagcaattatcactcccaatatcgcaccggcagcaacctgaatcggggtatgtccaacgtactcctttaatttttcctgcagcaccacgccgtccagcttcaggaaatcatcaaataaaagccggtttaataccttcgcctgtttgccagtctcctgcctgacgccgatagcgtcatacattacaaccattgacataataaaacagactgcgaattcaaagcttccgcccccgtatctcatccccgccgctgttgtcaatgcgcacatggtggaggagtgggaactgggcattccgcctgaaccgaaaatccgttccgggttaaaagagcggttcaatgctatatcaagcagtgtcttgagaacctgggcgatcacccatcctgccacaccgctcattaatgtctggttaccggttacttgctgaaaaaatgtcatgtttatctcctgtattttccttttatcattgccgaatctgtacgtattccgcggttctttcaccgcaggtcagcggtaacctgtacgccggtctcacaggtcactgccttcaacaagagtccggccgacagccggactcttgttgaaggcagtgtaaaaccgaaaaaccgctctccattttttaccttctgctccaggccggatgcagattataaaggaaccagtccttcatccgcgctccgacttccacaaggccgcagaatttatcggcgtaaatgatagtatagccttctttatattttggagggatcggggtcaggggccacatatgacggagtatcatattcttctccatctccgtaacctggaaatatatctcggcattcctcatcgccgttctgggatgggtgaagccatggaaatattcgccggtctccttcgcatgggtatgccagtcataaagaaataaatcgtggagaagagctgccctcgccgcctgtctgtagtcccacccgtatctcctgcacattctgtagctcatgtaagagacacggatgcaatgttctttacaggtagtgttcccgtgctggaagtaattatccattgactgaaaaacgggatcttccagaatatctttgacacagtccatatatccgacgtcttttttatactctccccgtgcagcccagttgttatcctccgcccatcgtctggccgcttccctctcctgcctgctcagtcttatctgtcccacgctttcatcgctctccttaatatccaatcagccagtcataaagttcctgatacttcatcgcagatgcatgccaggaaaaatctgccgccatgccccggtccacaatcttattccactcgcgttttttattataatatacatatttcgcataacggatacagtccagcatctcatgtgcattgtaattggcaaatgaaaaaccggttcccgtgccttcatattcgttgtatggccaaaccgtgtctttcagaccgcctgtctcacggacgatcggtaccgttccgtatcggagcgccatcagctggcttaaaccgcagggttcaaacagtgaaggcattaaaaaggcatcacaggcagcgtatatcttatgagacatctcttcggaataataaatattggccgataccctgtcattatatttccagtcataatggcggaacatgttctcatacttctcatctccggtacccagaatcacaagctgcacatcatccgagcaaatctcatccatcgcgaactgaatcaaatcgaaacctttctgatccgtgaggcgggaaacgatgcctatcataaattttttctcatcctgaaccaggccgagctgcgcctgaagctctttcttattcttcgccttttctttgcggaacgttctcgcattataattctgcgcaatcatcgtatctgtctcaggattgaactcatcataatcgatgccgtttaaaattcctctcaggctgttgctcctggctctcatcagcccatccaggccttccccgtaaaacggggtctttatttcatccgcatacgtattgctgacggtagtgatcgcgtcagcaaaaacaaggccgccctttaacatattgccgtctttgtatgcttccagtttatcaggtgtgaaatagtaatcaggcagttcggagaaacgctgaatcgtcttaacgtcccaaacaccctgaaacttcagattgtgaattgtcataaccgatttaatatcgcggaaaaactcaccgccgcggaatttatcttttaagtgtaccggaatcagaccggtctgccagtcatggcaatgtatgacatcgggcttaaacccgattacaggcagagacgacagagccgccttgcagaaaaaggaaaacttctccagatcataataccagtccccatatggtttcgcaccccagaagtagctttcattatcaataaagtaaaaagtgattccttcatacacatactccaaaatgcccacataacggctctgaccaagataatccatataaaaatggttcaaatacttcatatcattccggagattttctttgatacaaagatactttggaatgataaccctgacatcaaaatacgctttatcaaaacacttcggaagcgaaccgacaacgtccgccagcccgcccgtcttaataaacggaactgcttctgatgcaataaagagaatattcttcatacctactacctccccgactgccttatattgtaaacgattcacgttatacatcacacgatgattataatcattatacaatagaattatgaatttagaaagtagtatcagaactttttcaaccttttattgtcaattcattctccggtagtcgaggcgtatcttatccacaatcagggcaataaattctgagttggtaggcttgccctttccggtgctgaccgtgtagccgaacagttcattgatggtgtccattttaccccggctccatgccacttcaatcgcatggcggattgcccgctccacacggcttggtgtagtctgatgctttttggcaatcgtcggatacaggattttagttaccgacgccagcatttccttgtcactgacagacataataatagcatcccttagatactgataacctttaatatgcgccgggatgccaatttcatgaagcatctgcgttacatcattttccagattctgctccatataatccgttttatttacataaggtttcacttttctgcttcctgcgagcatcgttgttttatttttataacctgacagcctttttaatttgtcgagtacgctgtctctcgtaaacggcttcatgatgtagtagctggcgcccagtttaaaagcatctgctgtcagattctcgctgctggctgccgtaaccatgatgaaagatgtattttctttgaattcttcgttgctttttactttctccataaccgagattccgtccattcccggcataactatgtcaagtaagacaacatccggctttgttctcataatcatattgtatgcttcattaccattatccgcctttccaacgacatgataatctttttcactctccagtatttcgccaagcatctccaaagtctgcctgttgtcatccgcaattgcaatgttaagttctgccatgatactctcctcctaaaaatttaaatggtaatgatgattatagactcgaccccgttttcctttcaactcgatctcaccgcataattcgacacgaaatgtcaggttttggctcctggtttcatattgtcataccggataaaattctgtagactcccgtgatatttcctttttccggcttttttattatagcccatttttaggaaagatgcaaaatgatgtcggaaatttagcagcacactaacgcggtgaaataaattgccgggttaatcaagatgatgttatcggctttgattgtaaatactgctgtttagaattgagagggatgatatatcatattttcatttggccgatgatgacaagacctggtgtatttcttctataataaataccagagctagtaagacctttgcctgacggtttcccttttgtattatataacccgtttattgcttatacaagatgttgtgaaagaatatatgtcacggacttttaaaaaaatatttaccgggagtgattttgttcccggctgacgatcggatgacggtatcttcggcaatttatacgggatgtggtcaagccgcccgggattttggcggaatttgacttgattttggagggcggatcagaggggattttttgttatttagctgtaaatttttttggtttgttgtttgtgtttcactgccaggctccttcgcgaacactgaccgggcagagtggcgggttccttcgcgttacactactccggccgggcggcaaccgctggttcgctgcgcgcaccagcggttgtgcgcctttcgccgcataggccactcgcaaaaaagatgctcatacaagcaagcctgcatcgcatcttttttcctcctgtcctgcccggactcaatgctcgagcatgttttcaataaatatcccataccccctcgtcgagtcctggatgaatacatgggtcaccgctccgatcagtttcccatcctgtattatcggcgatcctgacattccctgcactatgcctcctgtcagctccagcagttccggatccgtcactttgataatcatatctttactttttctggctgtggaataatcaaccttctgtatttcgatttcgtaatccttcagttctcccgatacgttgcttctaacatatgctttccctttttttacatcctggcggtagccgattgggattgcctcgctttttacgcggttgcggaatttttcgtttacagtcccgaatatcccttcatttgtgttggcttcaatggctcccagtttagactggttcccatagtaaatcacacccgacatgactcccggtttgccaaaagtgcctttttcaattcccatgatctcggtatcatataattcgccgcccgaggtctgcaccagcattcctgtatcgctgtcgctgattccgtgccctaatgccccgaattccccgttggtgcttatataggtcattgtgccgataccctgcgtatcgtcacggatccacagacccagcttgaagtcaccatcggccgtttccacgggcgtcatctccacaggcatctcttccccgtctctcctcacggaaagcgtcagagcgccgcctcctgagctgttgacggcctgaatcatgtccttcttgttgaccgccgggacaccgttgatagcctcaatataatcaccggattttaagacaccgtccgccggatcgataatatcgccgtttttcgttgtaacttcccctgttcctatcaccatcagaccgtcggatttcatatatatccctatgggcaggccgcaggggaccgcatattttgtatcagagacatccacctcaatgtctttcaagctgaacaggccaaacaacttcatgttcagatggtatgttccttcattttccgaataaagggaaaatggctgatccaactgcagatgtatttcatctgaggggatattggagccgttgtttaaaaccacctcttcactttcgctttttaacgatacttttaccggaagggaaaaatggaaattctcttcctggtccaccaccacgttcagacggtccggaatggaccactgcatataaaaatacgacgaaccggctaataccacaagcccggcccagaacaggacaataagagactttcttagcttttctttcctggtcacctttccttcctccttacacaattgttaccgccttttcggcttttaaatcatttgtttgtcattcacgctgttagtatgtgacgaacctcaaaaatcagtctgctatttttcgtccagtctttcatattttttcaaaattcacactttacattttcagaccgcaggtatatacttcactcataaatgacgttttaacacagacttattgagcttgtgtacttcctgaaccggcggtgacagtccggatgagaaagacgttttctgcagcatacctgaagactgtttgttttcaggcatttttattgatgacggtgacctgtgcgcgaagcgtgcaggttatcgtttcacaggaaggttctgtatttaataatctttacttaattattccgttttatgcatcgttttcaggattagccatagacaaatctgcaccgcggtgaatccgctgctttccggtaaatggatcttgtggcgttctccggtatatgaaaggataaaaataatgaagttcagcaaagaaaaacatctgatatttgaagaagccgtggaaatcatgttccgtcagctcggagactggaaaattatggcgcttgcaaccagcgtcaatgaccatgtgacggtcagaaatgtaagctgcctgttttacgacaataaaatctattttaaaacagacaaaaacttcagaaaaacaaaacagctttttgagaacccgcaggtcgctctgtgctggagcggcatccaggtggagggccttgccgaaaacaagggactggtggcagacgaaccgggaaagcgttttgaaaaaggctataaggaatttctctggaacagctacaatgcctacagccatgtggatacggaaattctgattcaagtgacgccaaaacatgtggaagtatgggataccagcgacgggcagtacgcctatcagctttttattgacttcgatagccggactgtggaggttaagccttatgacgtaaaaaaataggagtattgctcccggcacgaaatcaaaatgatttcatgccattgtgcgatactccctttatgaggcggatttatattaaatatctttttaataagcgggttaattcaataacatcgataggctttgctatatgggcattcatgccgcactgcagacaatgctgtatgtcatcagaaaaagcatctgcactcatagctataattggaatcgacagggcatcaggatgaaccagtccgcggattgcttgtgtggcctcataccctgtcatatgcggcattcgtatgtccataagaatgatatcgtaataaccctccggtgatttttggaatttgtcaagacaaatccggccatcctccgcccaatccagttccacgcccaaatcggacagcagttcttttgccacctcccagttaagctcattatcttcggcaagcaggatgcggcgtccggatagatcaatattttgattcaatgtctgctcatgctctgttccaacgtccatatactgacataaagcatgatacagcgtagatttaaaaagcggcttggaaataaaaccgctgataccggcttcacgggcctctgcttcaaattcactccagtcatatgcagaaatcaacagaatcggtacttcatctcccagatttcgccggatttctcttgccgcctgaatcccattcatgccgggcagtttccagtccaataaaataatttgataatcctctctctttttgtggtgttctattaccagttctattgccttttctccgcttaatgtccattccgcttttattccgatggatttcagcgcgtccatggctgtcttgcataataattcgtcatcatcaaccaccagcatattccaggcgggaagaaccatatctatttccattgcgtccgctttttcaaaatcaaacgtaagaagaaattcgctgcccttatcaggttcgctttgtatctcaatggttccttccattgcatccacaatgtacttcgtaatcgccatgcccaaaccggccccctcggttttatgtatccgggttccatccgcacggctataggattcatatattcttttcagaaattccggcgacatgccaattccgttatccctgacattgatatgaattcgtacataattttctcctttcggagatttttcttcggagagggataattgtattgagcctccctccggtgtatacttcgttgcattcgataaaagatttaacaaaacctgatttaagcgtatgccgtcgcaccatacgttttctgtaaaaatattttcaacatggatgtcaaaggtttgctttttggtcttaacctgtggctgcatgatgttaactatgccttcaacaacttcctttaatgaaatttgttccgttgttaacgttaatttaccgctttcaattttagacatatccagaacatcattgatcagccctaatagatgtttgcttgataatgtaatctttctaaggcagttctcaacttgcttcctgtcatcgatgtgggctgtggcaatcgcagtcatccctacaatcgcgttcataggtgtacggatatcatggctcatattcgctaaaaattcacttttggctttgttcgcttcaagagccgcctgccgggccttctccaattcattcatctgcgaacgggttatggaaaaataccggaggaaaatcgctgttagaatgattaaaacagaagcacaagacaacaatgtcatgaacatacgctggctgctcagactatttatggtatcgtccaatatactatacggcatcaccgatactaaataccactcagaataaggtaatgaaattccatagatttgcctttcttcaccatttacttccaatgtgtccgtatattcctcatgttttttcagagcaacgctaaatttttcaaccggattgtcagcagatgattcactcaccggtgaatcagactgtttttgcagctgttcaaagaaattccacagctccgtgttgggattttgtattacaaaactaccgtccggccggataatatgataatacatcagctgcccttcatcctttaaggagaggaaatccgtaatgtattccagaggaacggctgctatcagtccggtgcttctgtcgccattagacattggataggcagcatcaacgccaaacaataccacttcatttccggcagtgtcaatgcctacagcgactctttgttccccctgtgataatgcttctacaaaaggttccgggttaagcggctgaattgcctgtccataaagtgtctggaaatctccctcggcggaacaaagtgctaaataactaaaatccctgacctgtgccctgtaaatgagttcctcatatagcagctctttatcgtcagtatcggttgagacaacagatacaattccgccggcctgatcaaaacgcagtttaatgacggtttcaaagtgtctggacatttgtttattcattccggacatataaatttccccgatttcataaacagccttttcactctttcggctcatataaattcccagcaggctgaacatgataatactaaagctcagaagcccgatgaagctgcctattaaaaaacgcgttgtagtatttttcattttaccgtttttcattgacattattcctccccggagttcttatacgctctaataatatcaactatttcatagtaatcctttgataattgaggcatcatatccacagccttattccagtcgttttgttttaacgctgttgttgtcagactgctgctttcaaataatctggtaaaagaaagattctggcaaatacctttgagtgtatgaacggctctgagggcctcggaatagtcctttttcaccatagacgcttcaaataagctgaagcttttatcgtccaggaatttaaatacaaatttccggacggtctgttcccgacgcagtctgcccagtacctcatcaaaatcgccgccaaattttaaatagcaatctttcaggttcataatcacttttcctccgttttagatattgtccgcgatgtctttattctcatcaagataacatatagtcactttgtttttcgtgttttttgattgatacatcatactgtctgcagccttgaaaagtccttttgcagttcctgttccatataccccgcctatacttactgtcatatgtaattcggaatggccgtcaatgatcagactatcgatagaataccgaatcctctccagttttttctcaaatatattggcaggaatactaaaaaaaataattacaaattcatcgccgccatatcggattacggcatctgtctttcgcacacaggataagacagtttgtgcaatgttctgcagcacaatatcgcctacgtcatggccgtaattatcattgatatgcttaaagttatccacatctattacgaccatcgcctgaatattatctgagccttgaaaatgctcgtcataataacgacggttatagacactggttaatgaatcaatatataataattgcaggtgccgctgtttgcgggacaggaaggtatatttttcataggaaaacaacctgtcatagtctattttatttcttatatcctgaatatttttagtctcctgttcaggagaattatcagtcagctcactttccagcgtatccgcaatctcttgcagacacagtaaaagagtcggattaaatgcaccgcattgtccttccaaaatcatgttcaaagcttctttatgtgaataagctttcttataacaccgctcactggtcagggcatcatatacgtcggccagcgcgaccacctgggcggctatgggaatttcgtctcccttaagcccgtccggataaccgtttccatcataccgttcgtggtgccaccggcaaatctcagaagctactttgacaagcggagcctcctgctgctcaacgggcaggtctaaaagcatgttagcgccgaccatcgagtgagttttcatcacttcaaactcctcttccgtaagacgtccaggtttattcaatattgtatcggaaattgcgacttttccaatatcatgcagcgctgaagccgtactgattaaggaaatatcagctttggacaagggatactgctcggtacgccagacaagctgctttagcagatacttagtaatcgtattgacatgcaggatatgtaagccgctctctccattccgaaattccacaatatgagacaggattgaaatcatcagcttattatttttctcctgctcatggaattgttctgcgataattttctcaagacgctgctgccttgcatataaaaacatcgtattggaaatccggcgctgtacaatggtcgaatcaaaaggacggctgatatagtcaaatgcgcccaagtcgtaagcccgctttatatttgcggggaatcatcggcagaaatcataataacggcaaaggtgtcattccagtggtatttgtttatgtaggctaatacttcaaatccatccatttcaggcatcataatgtccagaagcagaagggaaaaatcggctctttgccgcgagagaagagaaattgcttccacaccattctcagcctccaccacatcatattgctcttccaggatatccgccaaaagagagcggttcatctctgaatcatcgacgattaagattttttgtttttccataatactgaaactctttcctgataaatttacggttttattataaatgttatccttatataatggcaacattcatattggtcaggtatgcaaataggtttgtgtcctctaatactgacaaaatagctttctcatgatataattcagacagataggaggcaggttatgaaacaagaagaaacaaaatacacatttgtatataacgaaattaagcagcgtattttgtccggccagataccttatggaaagtgtcttccctcttcaagaatgctttgtgagcagttccatgtaagcagatacacaattaaccgtgtttttgacacattgcgggaagaaaattttattgaaattcaaccgcgtcttgcgccaaccgttacttttaaaagagatatctctggtgtatcggacactctgacagaaattttaaagcaaaaagacaatattatacaggtatatcagacttttgggctgattatccctccgctcctggtttttgcctcacagaactgcgaattagagtttctgcctcactataaacaagctgtaagagaatcacgtttagggagggcggccggaggatggcgcgttccatccagctttggggcagacatactaaaaatcggcggaaatgaattgttcagcgagctttattcaacctttgacctttacaataaactcacatttttcacggaagaatgcccttatttctctgaatgctttttacagggttcggtatctgtaacaggagttattatagatatattgaaaggcagtgatccatttgcaaaacaggaacaattatcatatatgtatcaaaatcttacggattctattgaaagtactttaaaatacttgtcagatacggcgccagattgtccaactcaaaccggtctgtcattttcgtggaatcccatgcgcggccatgattactactactcaaaaattgtcgacgaactgaatctgaaaattggccttggggaatatgctgtcggaatgtatcttccttacgaaaagcagctggccagacagtacgatgtctcaatatcaacagtcagaaaggcattgtcagaactcgaacaaagaggatttgtaaagactttaaacggtaaaggcactgtagttatagaaccagatgatacgaaacttcatcgtctggctcttaattgcggatatgcagaaaaggcattgcgttaccttcacgccctgcagctgatgatattaattatccgcccggcggctttagctgcagcaccgcagtttaccagagaggaaatagacgagttaacagatagatttacttcttcaggctctgttcatttagcagttattttagaaaccataatgaaacatacctctttaaaacctttatgtgttattttatctcaaaccaatcatcttcttgaatggggacatcattttgcttactatccggctaaaaagcatacgctttcccatctcaataagcaagtcattctggcgcttaagcagttaaatgagggtaatacgggttcctttgccggcggcatagcagactgctaccgctatattttgattagtgtgaagaagcatatggtagagaaatataagttccataatgtagctaatattcgtattccagaaagctgccagtcagcaggcaacccatgaaacatgacacgtaagaatcccgctcgcgggaattctattcaaaggataacctgcacgctccgcgcacaggtcaccgccttcaaccaaaagccgccgctgaaaatctgcggcggccggtcttctgtcttgaattatttcaacttgcttaacagcataactaccactgttataataaggactacgacaaagattccgcccatccccttacccattatttccagagcgattaataaattattccacataaaatgatcctcctttttctgcctgcttcaacaatttacagatactggctgacaagtttgattacaagtccgcccgcaataacagaggcaatctggccggatacgtttgcgcctaccgcatgcatcaggataatattgcctttctcttcttctgaagccattttctggacaactctggccgacatcgggaatgcggaaattccggcggcaccgatcatcggattaatcttatttttaataaacagattaataaatttggcaaaaagcacaccgccgatggaatcaaatatgaacgcaacaagtccgatacccatgatcatcagcgtatctacacgtacgaatgcatctgccctcatactgaaggaaatcgtgatacccaacagcagtgttatcaggtttgcaagctcattctgtgccgtatctgaaagcgactgtaatacgccgcactccctgatcagattaccaaacatcaggaagcccaccagagccacggatgccggtgagataaggcctacaatgatggtaacgataatcgggaaagcaatcttcgttgaccttgaaaccgccttcgggctgtatgtcatatgaatctgacgttcttttttcgttgttacaagacggatggcaaacggctggataatcggcacaagagccatataggaataggccgcaaccgctatcgctccgacatagtcggaacgcattatctgtgataccagaatagatgtaggaccgtcggcagcaccgatgataccgatggaagccgcatcctttaaatcgaatcccattaatgtcgctacgcagatggcaaagaagatgccaaactgtgcggcggcaccgaataaaaacataacaggctgcgaaagaagcgggccaaagtcaatcatcgcgccgataccgataaataacaggatcggcagcgcttcggacgcctcaattgtagtctggaacagccactctataacaccatgtgtctctccgattcccggcataacctgatcaatgacgccggacaacggcaggtttactaatatggcaccaaaccccatcggcagaagcagtgccggctcatactcttttttcacggctaaccagataagcaggatacctacaacgtacattacaagctgttggggcgtaatcgccaaaataccttccagtaaaaaatccatgaatcttcctccttaaatttgcttaatcagcattttcttcctaactgttgggcgctgctctctgcaatcaatccctgctcgaaaccggcggtaacagttctgacagcatgaattgttacaaccggcttccaaaaaaccgccgagttcctgtcagccaattagattgttcacacagaatccggaaaacataccttagaggatatttcttatgtattgaatgatacagcggtttttatttaacaggagaactttcctgttaaataagaaagaatcccgctcgcgggattctccgcctgcggcgggtcgcttcggcgacataatgccctaccgccgcagtgcgatcctccgcggagcggtttttatttaacaggtgaactttcctgttaaataaaaaagactttcagcatattttcatatgctaaaagtcttgttcctctacaaatcatacaggcatgtaaccatggacccgtcaatccggcccagggtatgttgattacatgttgcaactactcccttttaacggcttcatcttaccacatgtcgccatggcagtcaagaataaaaaagagattactttgggattccggtattctttacggtttctttaccgcctacttattctcatccatattaacgcctgcgatcttgatatttacctccaaaaccgtcagtcccgtcatgttctcaatggcagtcttcaccttatcctgtaccttctcgctgacagcagggatgctgtagccatacttcatattcagggacagatccacgctcacgtgttcttccgtcaccgtcaccttgactcccttgctcagattcttcatgccaagcttacccaccagttcgttggtaatattgccggccatggaatccacgccttctacctcggttgctgccagtccggctatgattgccactacttcatctgcaatctgtacctcgccgatcttgtctttttcatataatatatgggtatttctatcttccatctctttcgacacctctgtttcctcctgaatccacatgataattccattatatcaaaaaggctgtggtttgcaaaggagttttccctctttggcgcatttttagtccataattccgattattcctggagattcatcagagtgataacgatattctcagctcctgtttctgtttttctttttacaatatcttcaatctgggcgcgctgcggatcggtgatgctggacgcattaatgacaacgtctacttttccgtccgtgatgctgacaaccgggtcggcaaatccttttgccatcagaagcgtttctgccgcattttccttttcagcaattgcagacagggccatcaggctctgggttgccgcttctttcgatgccgcatccacactttcattattaattatgctcatcaatgtctctttgctctttgcgcgaacctgctccctgttcagctggacattggctatgtaatccgttacgctggttccgccggtcagtacggcttctcccggattgtcgatggatgagcttccgtctgcctgatcggaaccggtaagggcgctgtcaccctcgttcggatcgtcgagacttgcaatctcctgtaactgtccgccatctccgttcacatcaccggatgacacattttcagcattctggccggcagctccgcccgatacagcctggttctctgccaatatatcctcatcggaaatctctgtcaccccggcctcatagacgtctccgcccgctacttctttctttcctgaataattcaggtaccctgctgctgcaatcatgatggcaagtgtggtaatgattatctggtttctcctaaagattcttttcatcttcataactttatgctcctttattccacccgctttaatacttttattttatgtgccgggagcccaaataatgcttccattgcttcggaaatttctgcttttacctgagcgctgcctccgccccgggcgctgatgatgattccttctatttcaggctgcaattctttttcaattaccggctcctgagttcccgacgttcctgtcgtcagtgacgactctttcatctcctctgtctgtgattttctggtaccgcccgcgctgtctttttcctccgtggtggaacggctcctgtccctgtctacatggagaaccttttctttggatgacttgagcgtaagcatcacgtcaacctctcccactccatccacgtttttaagaatatccttcacacgctgttccatctctttttcgtatctcctctcctcatcctcctgcgtcccggatattttcccggccgccgtctgcgagtccgaatctccttcttttgcctccggcaccagctgcccctggacgaccggagaccccgcctcctcctctttgtcttttttgctccccggcggaaatgacagaatcagaagaatcagtccacacaccagcagaagcatccatttttcttttcccttcacccagtctttattaatcttccagcccgatttccacattttcttcctccatctgataataaccggctatcgtccgtctgaactgcctgatcgcttccgaatcccgcccatacggttcctgctgtgcaataacttttcccgcagcaggcgcggcattctccttgtcacgtttttctttgcgtacttcttccgactctgcgccctctccctccgcactttttttatccagccgtaccgacactttctccacctcttccagcgtaatccggtccacgccgcctccggcccctgaattggcgggagcgctttcagcctcatcttctttcctgaatttcagcacgatttttttcacttttccaaaatcagggttcctgctgtcctgttctatcacaacggaagcctccgccgcctcaagcccttcctctctagccagccggagcagctcatcctccgccgcttcctcataccggccaatcacccggtccagccttttctgttccatctcatcgagccggcctttcagttcgcccgcttcattctcaaaggagacggaccggaaaattgcattgattttttcatccagcctcagccccccggtcagaggctggagaaccagaagtatcaggatgcagccggcaaacagcctgaggtatttttcatactttccagccggcagaagatttgtaataattgtcacaaatatcaggtagtatacgatattactgacccagcggtatattccttccatctctcagcccccctttaacctgcaaaataggtggcgttggccgccgtacatataattgccagcgagacgccaaacagcaggagtgcggcgccggccatcgaaagcagcagacggcagccatttccaacctcgctgatgcaggccaccattcttttatcacagaccggctgcagaagtgctgccgccccctgatagaacaggcagagaattaccagcttcagcaggggtatggccgatatcagtaccagtataattacggctccggctccgatactgtttttaatcagcactccggttcccatgaccatctgtgatacggccgccgccccctgtcccagccccgggataacactgacgaaccgctgcagggatgtattcttcagggcatcggcatacggcgtcaccagattctggagcagatgaaagcccagcaccacccccatcatggttttaagtccccaccggatggaactgtccaacagatccgtcattttggaaaaaatgtcttctttcaccatatgacctgcaaggacaaacaggatataaatccgaaggagcggcatcagcagcctcagcaccagccattccactatgctgatggaaaaaagcatccatccgtatcctgccgccgaagtaatactgccccggcaaaggaaaccgccagaaaataggtcgggaccaacgcccgcataaattcaataatatgtgaaagaagttcctttgttatcgaaatccctgtcagaaagctggatgccagaaaggtaaacatcagaagataggttacataaaatcccgtctcagcaatctggctgttggaaaatatactggaaaagttagcaaataccgcccctatcagccctaatatcaaaacctggccgatccattttccgttcttcgtaatttcaccaaacaggctgtcccgtaacgtcagcagacactcatggaaaacttccgaaaagttgccctttatcagctccttaatcagctctttaaatgtaaaagaaaatgagccgtttccactctcctcattcataaaattctcgattgccgccagatcaaaatcattgagcaggttatctgcctctgcttcacagctcttcgtttccccctgctcctcttccgccgccgctgcctgaaaataaaagcccggaaaaattatggcagtggcaaacaggatgggaataaattttttaatatacttttttatttttccatatttttcttttacttcatccgccatagagaaatacaatccgcctttctgcctatctgccgcgttctgtcaggccaggaaatcccgaagtgtctcaagcaatgccagcagtaccggcatactgacggccaggattgacagcttggcaaatatttctatctgtgtccctattgccccatatcctgcgtccttgcagatgccggaagcaaactccgctatgtaagtaattccggccattttcaaaagcgtggtcaggtagacactatttatatgaatatagctttgtatctgatgagccgtatcgataatgatctgcatcttgcctgtcccgtaaaagaacagaatcagcccggccgccataatcaggtaggttccatactcaccgcccttgcttttgaactgaacggccagaagcacggccgccagccccagtactgatgccgtaataatcgacataaccgcaccttcccttctttcattctccgcttcccgtcgcgctgctccccgaatcagacggctacagcgcaaacagctctttcatcgtctcaaacagctgatagatgtacggtatcatccagaacagcaccagaaccagccccgccaggctggtgagaaaggcctgctcttccctgccgctgtgcttcagtatctggcagatgaccgacaccagtattcccactgccgctatcctgaaaatcaaacttacccccatatgtaaaatcctcctgcatctattcgttctatcatatcagcaccactgccagaaatagcccggacaggatacccattccaaagaacaggcggcttttttccggctcctcttttctcagcgtctctatggaatgctccaaatcttccagataaaataagattgccttttcctgcatatcacgatccaggtaccccaggctttccccaaaccgcaggagctgttcctgttccttcttattaagtacgctgccggcggcaaacttccccgcttttgctctccagactgcttcaaagctctctcccgtctcctgttccagctctgttgcaatcgcgatgaacagttcaccggcagcgcctttatttcgtttccctgttctgtaaagcgcttcggccagcgggacattagcgtacaaaatttcccctttcatatgggatgccattctccggagcgtttcaaggagcctcagccgctcacgcaggcggtggaccgcttcagcgccgataccgctgcaggaagctatcaccagtatcagtcccaacgttttcagccacataaaagactccttccccgtccgtcgcagatatcaagaacggttcccggtcccgccttatttcccagaatcacataccgttcaaagatatcttcctccagaaacctgcaaaatcccggtttgttccggatgtcctccattgaagttccatgtaccgttgcaagaatccggcagccgcagttcatcacgcagcgcagcgcctccaaatccgggtccccgccgatctcatccaccgcaaccacatcaggcgccatggaacgtatcagcatcatcatgccggcggcttttggacagcagtccagtatatcggtccgcagacccacgtcattttggggtatcccctggaagcaggctccaatttcagaacgttcatcaacgactcccactgtttttcctgccctgacacgttttcctgagcttccgccgtcggaggcctgccggacaatgtcgcgcaggagcgttgttttaccgcatctgggcggtgagatgataagcgtatgtaaaaattctcccgtcttatcatcatacagataaggcatgattttatccgcgcatcccctgacctgatgggataaacggatattcaggaatgtaacaggctgaatcgtcttcacggttcctttatccaaaatcacccgtcctgcgactccgattctatgtcctcccgcaaccgtgatgaatccctgtttcagctcctcctcataggcatataaggaatagcgtaccgcacattgaagcgtctcctccaagtcttcgcgtgttatatgacagcacttctctttatcgtcttttttccatattccaggcggttctttgagtgttccttccgctgtcaccgtatattccctgtttttataaatgataaaaagcggagcgccgatccgcatgcggatttcctcaagaccctccggctccacatcaagcgttcccagcactcctctgagcttttttgaaaaaatctgaaacagcctgtctttgttctccatcctgtccgcctccttttacctcaatatatgtgatggtaaaaaaaatatgacaagccattccaggcggctgtccgctgcaaatgcaaaacagggagaatccaaaatttgaattctccctgcctctatgccagcaccttcgcttttttaagctttcctctggctatttccagaacttccagctcttcctttgtcttttcctttttactgaaaatttcggccctcctgaaatgctccagcgcctccttttcctcttttttctctagatggatcattgccatgcagctttcaccgatggagcgcagccagtaagtcccgaattcatcatatatccgggcgctgatacagaaaaatttttccgcttcctccattcttccctgcaggaagagaatataggcgtaatcttcataaaacagatccaggccttttctacttcctctggtcttacagagccgcagcgcttcctctatggcttccagcgctttatcgtactgaccgcggcatctgtatgtaattgccagataatcatacgctccggccgcaggataaaaataggtgtttttaagccgtggccggctgaaaatttcaattgatttgttcagcagttcctccgctgtttcatattccccgtccagaatatggcaatagctctcaagccgcaggattgacccgtattccggctgataataagaaagattcttcatctcttttaccagacagagataacgcttcatcagagcggagtcttccgccttcaccccgtaacagagcgcttcaatatacccataaagcagcattctctcatctcccgccctgccggccagcccgatcagtttttccgcatatataagtcctttctctcttttcccatcccggttcagtgtccttcccttcaggtaataaatttccatctggagttcgtagcacctccccgcatccatgtccccctccatcatatcgtagcagttctgaaacgtatccagcgtctgataaatctctttccttgagacagtaaaagtctggagatactccacatcatggggtacggccgggaagaattcatcatagtaatctaatatatatctgagataataaacgttataatacagcgcatcgtctactctcccggcctgtgcggaatgatatttcagctcagacagcacaaacaaatcatactgaatccggccctgtgccctggccgattcataatattgctgtgccatccggtgcagttcatttttcttgaatgcggctgtacggctgtaaatgatgtctctcagcattttagatttgattctcagcctttcatggcctttctggtttatttcctccaatatgccgctgttcagaagccggagcaggcagcggattgcatgaacggccttcacctgtaacatctcacataaaacagaaacctccacgccgttttccattaccgccagatattccagatactcctgttcctccctgctgaaattctcaagcaggctgaagaactggcattgcgccttgggactcatcgcataaacattctcctccccctttacaatattggcggccacctcccgcagcatcagcagattgcctgcggtatagcggtatatctccttttcttcctgttgaaaggtccggccgtccggaaagcattccttcaaatacctggagcattcgccttcctttaacggttccaggcagataaggcggagtcctgccttgtccctctcccgggcgtattgattaaaattcatctggaagtttaaagaaaatccggccattataaaaatttcactcctgagatattccagcagacagcccagtatcaggcacagactcttttgatccgcatattccagattatcgattctcatgatacagtggttcctggcgcttttcgctttccgggccagctttcctacgaggttcataaaatacaaatccgcattttccccggggctgcctgccatcagatcatccggctgtatcttcagccattttgctgtctgggcaatgagttcccttattgcatagtaatcgacggacacatccgtactttttaaatggatttttatcacatccctggcgttatactccttcgtgaatttccaccagacctcctctttatccatcccctcctccccgcagataatacaggtgtcatagggaaacccctgcctgtatttggagtattcctcctgcagggcggccagtgccctgatatggcccagataaaacggccccttggatgtgttcctcctaagctccgtcttcatccgcatcacatcttcatattccttttttaccccggctcccggttccaggtgcatatcctggtacagccgctctgaatactgggtatacgcgtaaacggctttattatattcgccattctgtccgcatattttaatcagagtatataccgcctcttcattatgaatatcaaaccttaaaatatactccgcatatttttccgccatcacgtgatcaccttttttgaagcttccacgcattgctggaagaagtctctccctcagcagccgttcataggtgttctgcatgctgcatacccattcttcaaaccccggacagttcttcagatagtatttgtcaagaaagcagaatcggtttaattccagcagcctctgttcgctgttttccataataaataaatccgtatccctgaagatttcaacttcagggtttaaactgatataagacctcccgccggtaagcaggaagtctttcccaatcagatttcttattttatacaggctgttgcgcagatttccccttgcaccttcctcatcgcagtcacaccagaaaatagctaccagttcgtctctcgtacaagttccgttgaaaagaatgtagagcagcattgcctcaattttcttctgcgttattgtaagtctcacatgatcaatcaatatttccggctgccccagaaaatgcacttccactttcatcctattcacgccctttgcccatttcaatttatctatatattactattcccgtccgtttttttcagctctttcagcaattttggaataaattccctgtaatctgcaacaatgccgtaatctgctgcttcaaaaatcggcgcgtccggattattgttgacagctacaatgcatttagctttgcccactccaagtaaatgctgaacggcgcctgaaattccgcaggcaatataaagctccggcgcaatgacccggccggtctgccctatcatcctttcatggggtattaagccgctcgccgccgcaggcctggttcctcccgttgtacccccgaacaatccggccagctcatcaagcagttcaaatccctccctgtctcctattcccattcctccggcaacaaccgttcccgaagtttccagagcttttggcccttcctcctctctgacggaggatactgtctttgttcggatttcttccggggatagctcaaaacaggcccggctcagcctcccctttctgccggctttacgtacggccggctcgaacataccgggccggaccgtgcacattgccgcgcttcctccaaccgtcactatttccgccatcagacggcttccaaatgccgggcggatttggcacatctgattttcttcatctattctgaactccgtacagtccaccgtcagcccggttctggttctcgccgccactctcggagccagatccctgccctcatccgttccgccgaacagcagagcatagggccgattttcctgtaccatcgttgccactgcttttgtatatccgtccgttgaatactgctgcagcagactgtgccggaacaggcatacttcatctgccccatattcaaacagcccctgtgccagcgcttcatgctctcccaccagaacggcgcagagaggccgtgccaaccggtcggccagttttcttccctctcccagaagttcaatgactaccgggtgcagtccttccccctgtgtctgcgcataaatccatattccccctctgtctttatcatgaacctggatgcctcttttctgatcctgcccttttaattcctctgtcatttctgattcaccctctttctcagctcgttcgcgagagtctgcgccatctcctccatattcccctcaagcatacgccccttcggcgcgctttgcggcaggaaggtcctgcgcacggcggtcctggaaccgcaaagtccaatctcctccggcagaagcccaagctgtccgcagtcccatatgatgagctgcttttcgcaggctttacagattgccccgattggaatgctctcaaacgcgctctcctccccggaacagacaataacagccggggtgtcacactccacggtctgaagacatccctcgaacctgcgcacggccgttagcctgccgttccagtttacccgtcttaccagggtgagctgcccaattccaagatgttctgccagctgcggccccacgtggcccgtttcaccgtccgtggtctgtcttccggtaaatatgacggagaaacctcccgcttttttcaccgcctccgccaataccagagaggtagcaaaggtatcccctccggcaaatgcccggtcacacaacaagattccctcatccgccccgcatgccattgcctctctaagaacctccgacgcggccggaggtcccattgttattgccgtaagggatgatttttcgcccttattttccatctctcttcgaagggccgccgccatcctgacggcgctcatatcctccggattcagaattccggaaacctcacttcttttcagggtccccgttttcctgtctatctttacatcgtccgtatccggaacctgcttaatacaaactgctattttcatatccgcaacctcctgtattatcattacggtctgtcgtccgcaatccaccccaaatgtcattgcccctctatcggccctttaatacctgcttcgcaatcacggtctggagaatctgggaggtcccctcatagatcgtcgtcactctggcgtccctgaaaatcctttctatcggataatccttcatatagccgtaagcgccatgaagctgaagagcctttgccgctatctcattgcacatttcggatgcaaaatacttggctgccgccgcttcctttgtgatattcataccggcatccttcttctcagccgcgtcataaatcaacgcgcgcgcacagcataatttcgtctccatatcggccagcatgaactgaatcccctggaattccgacaatgccgcgccgaactgccttctctgcctgacgtatcccaccgcctccttcatagccgcctccgctatgccgaggcactgggcggcaaccacgagacggccggaatccagcgtcttcatcgccatctgaaatgcctttccctcttctcccaggatttggctcttatgtacctttacattttccaggataatatcggctgtaggtgagccgtttactcccatcttcctctccggctgtcccaccgaatagcccggtgtatccctctctattataaatgccgtgattcccctggctcccagcgacacatccgtggctgcgaatacaacggcaaaatcacagagcggcgccgccgtgataaaggcctttcttccgttaataatataataatccccgtctttcctggcaatggtgttctgggtggcggcgtcagagcctgccgacggttccgtcagtgcaaacgttccctccttctcgcccttcataaccggaacgaggtatttttctttctgttcctccgtgccgtaattcaggatgggaagccccaaaagagtgttgggagacgtcacatagagcgtggccgatacgctggccctggccagctcctccatgacaatcgccatggccacgtatcctgcgccgcagccgccgtattcctccggaattgttacgccaaaatactggttctgcgccatcttccggtaaagctccttgggtatccgtcccgtctcctctatcgactctgccagaggggccacctcctgttttgcaaattccctgactgctctgcgtatgagcctgtatttttcagattcaatcacttttctctccccctttccatctctgcaaatgtctgcagcagcgtctccgcctgtgaactgacgaaggaggtattcagctccagacagatatgtttgattcctttttcatccaaagcctgtctcatcagcgggtaatcgtattcctccggatcgcagaaggacgggatacagacaatcactcctgcctgattttcaattgcctcttcacacagcctgctgattctgcttttctccggatccatcgcaacggaacagaatttaaggtcggcaaaccggcatgccagcctgtaaaatgaatccttcccctccaccggcgcgtctgtctggaattgcagggattcctgcagcagatagtcggacagcaccgccaggttatggctttccatctttttcagaatctgttctgattccagcaggattccggtcagaatcaccttgtttccattccaatccctcaccggttccttcttcaaaagcctggttaaacgcccgattttttcagtataaattcgcttatcctggcagcctgccgccttgatgagcatatgccgcagatacggtgtgattatatccgggtgcccggacgcctcttttacaaattccctcatcgcgctcctgtaccggttgtatacttctatcgaatcctgcagcgctttctccgtaatcttttttcctgttattttctcaagggccttcccggcgcttctgtattccgaggccagaaactccctgccggaacgccccttcctgttcgcaggatagacaaccggtattaccggaatatgcggtacggcggtcttgaaattttgtccggccgatcggagggcgtcacagtaaaccggcattatcattgcgcttagcagcccgtcatattctccccccatggcctgctctaacatctgctggaccggggcacagaaaaatgccggataataccgccgggccttctctatctccctgtcgtccccccatactgatacaggcagcagaccggcggcatcggccagctcctccggtccaaatcccaggaaacagccagctgcctctttccctgtttcctccttcgcctttctgacggcctcgcgagtgtttcgggcggtttccgcaagctccgaaatcagcttatcaagctcactcatactagatatctcctttatctttatccgcaccgtcaatcccggatttccgtgcggcctctctctcatccataatctcacacagaccttccactcgcgtctcatactgctgtttggcataacacctgggatcggactgatcaccgtcgtacatcatggtgggcagccctgtttcctccctgattttccgctccatctcaaaaaggattccgtcccaggccttacagctccggttcagatgcatcaccacgccgtcgcaccgagttctcctggcaagattgactcttctgtcacaggatcgctccagattcgtattgtcgagaaccacgctgtaggacagcagcatttcatccaggctgccgtacattcttccccatgtctcggtgtaaaccgtgccgcacagattgcatccctgattcttgagcgtctggtaattatgctgcagatggggccagcaggcaatgccttccatcataatgcggtgcctgggttctcccctgaaggtggtctcaccttttctgcaccgttcctccatctcatcggccagcatcctgatcgcctccaccgtctcttttctgcctctcgcacagaccatgagggccatatagttaaacatctcaaatccgttaaccggacttggatccgactcaaaataagcggaagcccttctccactgacggccgcactcatttgaaactgccatcacttccttaaaccgttcccaatcccatttttttccggctatctgttccaaactttttatcagctccggaatctgcgctttcatatagtccagccgcgaccggctgacttcatattcggtattgtacggaatatcatagactatcattggtataccgcattttttagcaatattctcaaaccatttgatcatctccgtacagatattatttgtacacaccacaaaatcgggcaggggcatattcaggctttcacactgcccatcctccagataccccagattgacacgtgcgtagccgcagatatcattgctgtaccccagcttttccgtcctctcaatcatatccatggattcatgctttgccgacagcgacgtggagtggttttcagggtaacagactgtcagccccattgtctccagaaactcctggggaaagtttgatgatgcccagcccaccgggcgcccctcattcctggccttccacgcctcgtcgtaatgacgatccagcagttcatttaaaagatgctttgcactcatattttccacctgcgttttctttaaatatccggccccgcataggccttaacagcctgttccgcctccatacaatctatttcattccgggaatatcccagctccttaagcacttcctccgtatgttcccctatcttaggccctttccggtactcgcaaaggcctgcctcccggaatttaaccggcgtccggaccagaatcctgtctgtgcccatgtcctcccgctccggatatccccccacatggcagaggatattctccgcccaggcctgtggatccgttaaaatctcctcccacaccgcctctttgtcaaagggcagatctgcggccgtaaatatctcaagccattcatcaatgtttttttccctgaacgtcttatcaagttcaacgatcaaatccctggagtgggtgctgatccgctcaaaatgacagaattcttcattctctgccaggtcatcacggccaatcagatgaagcacctcccgaatgcggttgtcgaaatcgttcaccgctccctggagccatcttccgtcctttgtctcataggcattctgaagcggattggcaagatccatcctgcttctgggatatgggttattcccgtactgtgcggaggctatcagatgctccatacagaaaacggcagtctggtaaaggctcacgcttactttctctccctgtcccgtctgctttgccttcaccagggcggcgcagactccggaggccagacagaggcccacctgcgtatcaccgaaaccggctaccgtcagaagcggggaagtacctttctcatacagagtgccgctgattcctcctctcgcataataagcggtaaaatcatatcccggcttgtccttatccggccccgtttcgccatatcccgatacctgtccgtaaacaagagacggatatctttccgacaattgctcataggaaagccccatacgcttcagcgcatcctgtcggttgttcgttataaagacgtcggccttttccagcagccggtgcatcacttcccggcctttttcagacttgaggtttaaaacaatgcccttctttcccgaattctgctgatcatatgcaggattctctctctcatcgtcaatcggcatggataccagcttgcccatgaaacgcatcgggtctcctttaggagactctatttttattactgtagccccccagtccgccagcattctggcagcgctgggagcggcgacaaacatcgccagctccaccacggtaatcccttccaatggtttttgtttccgatccatgttctgttcctttcattttctatttaataatctcgtcaatcagcgtgtcgctgcagagatagggcagggtaataatctcattttggcgtttatgttcccgcaccgtctctatcgaattttcattccgtccccaggctcgccttgccactccgcacatcacgtcatagttcaccgctctttcgattattccgtccgcccttctgcttccgtccagaagcaggccgtagccgcagctctgtgaattaccgattccggttccgcctccgttgtgcatggacataagcgtcattccgagagccgcgtctccggcaaatacgagagccgacatatccgccgtaatattgcttccatcccggatattggaggtttccctggaaggagcatccgtaccgccggtatccatatggtccctgccgatcatgacggggccgatctctttatttcttaccatctcgttgaatctcagggcaattttcatccgcgtatcggcatcctggtataaaatcctggcctgggatccgattaccagcttatttttctctgcgtcccgaatccagatgtaattatcgtagtcctgatatcgtctgtctttttcaatacactccattgccgccagatctgttttatgaaggtcttcatcccggccggagaggcatacccagcggaacggcccgtatcccaaatcaaagagattcggccccagaaaagcttccacaaaggatggatagataaatccatccagggaattttcgccgtttacgcagacctccttaatccctgtctcatacattgtcgttgtcaggctgttgccgtaatcgaagaaaaatgtgcccctggaacgcagtgtttcaatcagctcatggtgcttttggattgtcgccttaacccggtgtacaaactccttcggatcctccgaaagcatcctggtccgctcggcaaatgtcatcccctggggacaatatcctccgtcgaaagcgacatggcaggacgtctgatccgtcataaaatcaatatgtacgttatgatccaccgcatactggagcaaatccacgatatttccgtggtatgcaatggaaatcggtttctttttctctatccattccgccgccaggctaaaggcctcctcacagctttccgctctcaggctgacccagcccagccgctgtctcaattcgattttcgattcatcgacttcggcgataattccaaccccgttgcacatctcgactgcttttccctgcgccccgctcatcccgccgagaccggatgagacaaaaagacttccctccagcattgtctcactgctgtggtgcaggatttcccgggcaaccgaaaggagtgtggagtaagttccatggacgattccctgggagccgatatagaaccagccgccggccgtgaactggccatagttggatacgccgatggccgccgccctgttccagttgtcattgtcattatattttccgaccatcaaagcgttagtcagaatcacccggggagaatccggggcagtaggaaaaagaccgagaggatgtccggagcttacgatcagcgtctgatcctcctccatctcctccagatatttcttaatcaggcggtactgcatccagttctggcacacctgtcccgtctcgccatatgtaacaagctcatagggatacagagccacatcaaaatccagattattatcaatcatgagctggattgccttgccggccaggcatctgcctctgtatgcttcgatcggctttgccttaatcaggccgtgcgggcggaaacggtaaccataaattttccctctcgtctccagctcctgataaaattcctccgccagttttctgtgatatttttccggaatataacggagcgcattcttgaccgccagctttttatcgccgagggaaagcttcgcctccctctttggcgccctgcgcacggcggcgtccagcgtctccggttcaggcagcccttcttccagcctgattttcataaactcttcgatttcctcgtttgtcatttcctcacctctgttttaatatttcaccgggtgttacccggcaggcctacattccaaatacaatatgggtcacgatagccaccagcggaattaacaggacggtcctttccaggaaaatcactaccaaatccgcaaaattaacggggattgccgaatccagcattgcatttgcgctttccgtaaaaaagataacctggcaggtggagagaaccacgatgtaaaaccctgccataaccgacactccggttccgctgattaaagtagccgggagtgacattgccacaaacgccgcaatggcggaaggcgcgattgtctgtgcatccggtatccgcagcagctccagaaccggccggatcggtatcccgagccatgttatgacaggcgtgtaatttgccaatacgagacagataatcgacagtgaaataacataagaaaccaccttgcagccaaaaatcatcgatgacgtaaatgcatttataaaagcctgcggcttcgtgtttccggccttctcaagcgccgtccggtatgcctgtacaaaaatttccgtactgaatttctgcggttttctctgttcctgtgtttgggcagagccgttataaaaagtatcgccttttctggaaatgggcggaatccgtatcataatggcggcaacgacgaatgccagaagcaggctgcacaaaataataacggaataataatcctcacaaccggccaggccgcttaaaaacgcgtaggcgcccagactgacgaagctgaagctggtcgtaatggacaccgactctttcgccgtataaacattgcctttatagaggttgcttgtaaccattaccccaaccgccggtgagcagacaaatgaagtcagggcatccaccgatgcttttcccggcaatttgaataccaccctcataaccggctccaaaattgttccaaaaaattccaacagcccgtattccaacaatgtagttacgaaaaagccggaaactacaatggcaaagaatacgtcgcgcgctattttcagcgaactggttcccactgccggatccagaatacaggcggggccaatttcaaaaacaaccatcacgccgaatattgcggccagaagataacagattgaattaaatacgccgatattggcaaagtattcttttataatggagggaggattggaagtccgcccccagatgctgcacgccagcaccagcagtgaaataaccataaccaggacatacccggccggcagtcccagagccgccttcgcattatcgattaggtgaattaacggcaccttgctgactccgcctatactcacgttgataaagaagaaaaacaccccaaacacactgaacaccagaaactttagcagcgcaccgtttgatgatttacccgtcgcggctgtcttttccatataaatatcctcctttttcctgaccctcttattcctgaatatgcacattagtaatcgttcggccaaactctaatcatttattcaggagtaccttctctgcaagcttgctttcctttgtcatgctaccatcttatcaccccgccgttttttttccgtcaccttgcaggcctcccctccgtcatttttcaaaatatttcaatgttttttgtaattatacaaataacaaagtgatggttttattattatccattatttgcactgcttctgcgttcaactgtcccctttattatttctaattctggttattttaaatcagtccagtttttgttatagtgctggttataagagctggaaacgatgtttcttccgcttccgtcgtacacaattaagaatgaatcaggaggtttgcctatgaaacgaattgttacacttcaggatatatcctgtgtcggccgctgctccatcacagttgcccttcccgtaatatctgccatgggtgtggagtgcggtattctccccactgcggttttatccacccacaccatgtttaagacttttacatgcaaagatttatccgaccagattggccctattgcagatgcatggaagcaggaaaatattacgtttgacgcggtttacaccgggtatcttgcatcagccgaacagtgctcgcaagtatgcgctttcttcgaccgtttttatgacggtaataatctgatactggtggatccggctatggcggataacggctcgctctatccggcctttgatgaaagctttcctgctgagatggcaaaggtctgcgctaaagcagacattattcttccgaatataacggaagcatgcctgcttaccggaacgccttataagacttcctatgatgaaagctatatccatgagctgcttaagaaactgctggcgctgggctgccataccgcagccctgaccggagtcagttatgagaagggccgcctcggagtcgtttcccttgatcgaaacggtgatacattctcctattttacccggcactgtccgcagagttatcacggcacgggagatttatactcatcaactgttctgggcggcctgatgaggggattaagccttgggaatgccctctccctcgcggctgatttcgttgtggcctgcatcgaagccactgcctccgctgaaaatgcgagatggtatgcagtggaatttgagtctcagattccgttgctttgcgagatgctggatcagcggttaaaaaataattaaaagaagttgaaacttttttcctcctctctccgtctaacctctgaatacaaaaagaggaggaaataatcatgaaaaaaagtaaattaattatcgtatcaattctggcaatagccgccttatcgactgcaactgcctgcgcgggtaaaaaaaacgaaacgcctaagacgcctgtagccgcatcggcagaaacaactgccgcttccacagaaaaagaggaaactgccgcagagcagacggaagccggggacgaagcaaaggatgccgaatctaagaagagcggacagatgacaggtgtgctggaagagaataagggcttcatctttactatcatttccgatgatgacggggaatcctatgttttttctctggatgacgaaaagagcctggacggtataaaagacggagataaaattatcgtttcctatgaaggcggggatccggccgacagagattccgactgcgtggttactaaggttgagaaggctaaataaaattaatattttcccacggatattataagtctgtatctcaaacctgaataacataaaggccgggagcctgaaaagtttattttcagactcccggccgtttttctgcggggttatgcttatctgcgggccaattcggctgtgttacgtgcggcaagattaataaagacctgttttcgtcatatattcatccagcttctcaagtcttctccggcctttttccccgctcagcttcccaaccagcgtcacgatgatttccatcgaaagcgccagggaacttatggagtttgcaaagctgaaggaatccacctggttcaccaccgtaattccggcacctttagcgacaggagaagaaacactgtctgtgaatgcaatgacaggacacccggccctgcgggccatctccgccacggtaagcgcatgtcccgagtatctggggaggctgaacagtatcagtacatccctctcccccatgtctattgcctcatcctcaaatccgtctctccggttgacatttctgacattctcaagaacatgggataaaaccgctgtaaagtaatcggccaggcctgccgtatttctaaagcccgcaatatatttttttctgccccaatgagcatcccggcaattctcagatacttatcatcaccgtttgccacctgatcgcatgcggcccggctggcgtgctgtcttcgaaccgcatccggtatctcttccaacgccaggcagtcggcatttttaatcttctcatagggaagctccgaacggctcagcgcctgctttaccgacagagcctcctcctggaggaaacggcggaaactttttaaactatcaaagcccagcgtcctggcaagccggattacggtagtgtctcccacccccgctgcttcggccagttctgccccggtcatcacggcagcctcttccctgtgccgaatcacataatcaaaaatcatctgttcttttttggataaatttactgtccccgccatttcttccagcttcatctaatctcctgccccggctgtttataccggccgtcctgtcttattcatgcacctctgccgtcgcctccagctccaacagacagcctttgttcagcctgcccaccggaaggacgatcctggccggtttatgttccccaaagaactcactgtagaccttgttcacatcgccccagtaatccatcgagctgacataaatccggcacatcacgacatcctctttttcacagccggccgctttcaggacgctttccatcttggccagagccatctttgtctcggcttcaatgcccccacagccggaaggccggttgccggatcggccgacgtctggcctgatatgtagagtaccccattgctgatcattcccggtgtgtagtggcccgacgggctgttttcgttgaaaacctgtttcattctaattctacctcctcaagtttttttatctgatccagtcccacattgccgcctgagacgacaaagcagactttatccgatttcttcacgttccatttctgaagctctccctgaagtgccgcgccgattccaatgcaggaagacggctctgccagaattttcccttccattaagaggagcttcatcgctttcagcatcgattcatctttaacacccacgaaacctgccacattaccggtaactatcgggtaattccgttcccccggtttttgcgtcagcagcgcgtcggcaactgatttctgttcttccagatttactctctcacctgcctccacactcattgcatatcggcggaggacatacggctccgcaccgattacctgagcctttggaatctgtgatttaactgccacagacacgccgccaatcagccccctcctcctatcggcaccaccacataatttacatccggaagctgctctgcaatctcaagtcccagagttccctgtccggctataatctgataatcgtcgtatggatggataatcgtgtagccataccgttcgctgagctgtccggcaatgatgtggcgctcactcagcttacactgaaccacctcagcccccagcttccttatgccgtccaccttcacctggggggcattatccggtatgactatcgtcgccttcacaccgagaagctttgcggcaaaagccacgccctttccatggttgcctgaggatgccgcaactacgccattctccagctcctctttcggcatggagagcatcttgtttaacgcgcctctgattttaaatgaattagtccgctgcatgcactccggtttgatataaacccggcatcccagaatatcatcgagattctgcaagtgaagtaccggagtctgatagatgtatggtgccagccgttctctggcctccataatatcctgttttccaaacattttctctgctcctttcgattgacacgaaataaatataaaaattcattttatattctaatggatatttttattttaatccatttaaaaaatcctgtcaatcgatacctgagcctcatattataaaagcggtttatggcaaagcacgaaatggccgggcgccaaacaatagctttatttgacatcctcctccgctgattatatactgaaaaaaagcccgtaccgggccaaaggaggatttcgatgggaaatacacaagagcaaaatgaaccggcagataaagcgcagtgtccggaacagagcacagtcccaaaaaacagcggtcagatatacacctgtacggactgcggactgaccggctgccggaaagaggacggaaactacccgcccttctgtttaacgatgcagacggaaagcggcgaactggatgaaattgccgccctctacgcatctgattcaatcgacggaacgattgcaagagcctcggccaaaattgagggaaactattactgcagaaagacaagagtcgaggagacggtgctgttcatcaaggccatcggggcaaaacgcgtgggaattgcaacctgtgcaggcctgattaacgaagccaaaaccttttccaaaatactcaagaaaagcggtatcgaccatgtcagcgtgatatgtaaggtgggcagccgggacaagacagagatggggctgcccgaggaagataagataaaaccgggcacctttgagccgatgtgcaatccggtcctgcaggccagatatctcaaccgggcaggtaccgacttaaacatcgtaatcggactttgtgtcggccatgacgcactgtttaacaaacattccgaagcgcctgtcaccaccctgatagcaaaagaccgtgtgctcgggcataacccggtggcagcgctttactgccactattatgataaattgtataaaccgtaagcagccgttcaagaaagggcaattacgcctttaaacctcagcaattgccgacacgcacatattccagatgattccgggcggcaccggccagccgaagcagcagctccggactcgtagcctcccggtccgtcatcttatagcgaggaaaaaagcggttcagatgaagagggatatccctcctgaccgatgcaatccactcagccatttcctctatttccctttcggtatcgttaagccccggtatgattagggttgtaatttccacatggctttttcccgcagcccggacaatgaaccgtttcacatcctccagttccccatgcaccattctgtaaaaattatcggtaaacccttttaaatcgatattaaaagcgtcgatccagggcaaaacctcatcaagtacctccagagaaaccgagccgttcgtgatcaccacatttttcaatcccatttccctggcagggattgcacagtccctcacatattcataattgataagaggctcattgtacgtatatgcaatcccgatatttcccctgtttacgtattccgccgccattttcaccgcctcccccggactgagatggtatatcggaagcagcccgtcaatgatttctcgttcgcctgccatggaaatttcatgattctggcagaaagggcaggcaaaattacatccatagctcccaaccgataaaatacggctgccgggatagaagtaattaagcggtttcttttcaatcggatcaagagcaagtgaagtcacttttccgtaggcgttactggtaattattccgtccctgttaactcttactttacaaaatccggtctgcccctcttccagtgcacaccggcccgcacataccctgcaaacagttttcaataatgtctcaccacctcaaaacgttccgtctcatacgcttcatcctcgtcaatacctgcctttcggagcgcgatggatatttgctgttccaccgtgtcaattccctcaaggttcggcagcagcaggcctctgcgacgtccatgactgacgatgaccccgtattttttcacatccagttcctcgtccgaatgaaccgtttccggttctcccagaacatcaaccgtacagataatctgccccagttctcctttttccacctgcggaaatctgggatcgtatatcccagaactgactgcattgcgtataatttcaccggctatattcttacaggttccctgtatggttccgatgcagcctctcagctccccgtccttcttcaaagacacaaaaaccccggcctgtctgtttatcatcacgtccggcagatgctccgggacaggcatctcccttcccgtatccaggtaatatgccagggactccctggccagagccacataggcatcccggaaagaagccaccgcgtatccgactccaaatggtccctcataggacagcaggcgggaacgcagtacctttccatccaggcaccccgccataatacagaaagcccggtgcccgcactcacccgcatttttgcaaaattcttccgaaaacccgatcagcttttgaagattgcctccggccatcacttccgtcacccttttatcgtattccggcccttccttcgtgtactcgtagggtccgctgtccatcaggcaatgggaaagatcaccgctggcgataactgcgattctgcgatcaagcctgtccgccgcctcagcgatacactgtccaagcctgaaatgctcatgaaaggactgtccggagagtccaatccgcaccagtttaaaatctgcaagctctcttctcagaaaataaagaggtatcatcgtggcatgatcaagctcacgccctctcccgccttctgttcccgccgcaattccccaatcctccgcaagaccgcacagctcggagacaaactccgtgtcataaactccgcctatctgaagctcaggatatccgtaaagtccgaaatcccccttcgcccgcgttcccggagaaatatgaaaataatcctggtacataacggaatgcggtgaaagtattatcactgtttccggctccatcaaagccgcctcttttgcaatttcccgataggaatcaattgtcttctggattttccgttcttcccctcttcctatttcaggtaaaatcaggggtggatgtggaacgataaaagctcccgcaactgccatacagttacctcccttcgttatattatcaatccgcgcagcagttcacgttgtctgaactgttatatatccgcctgtcctgtataaattcattataagttctttttgcacactatacaatagcttccgctcctgcctccagtaaaaagggcctcccatgatttttgaatttaatcatgggaggccctttttactgtttcccggcattcatgcgctgttactattcacggccctgctgaaaagcgcggctccgcgaacagtaaccatgcgcttcataacccggaaaatttctctctgtttttctatctgttctgcgaccggtactgccccggtgtcatgttatacgtctttttaaacagcctgttaaaatgctccaccgtctcatatccaactgtttccgcaatggactccactgtctggtttgattccttgagcatcttcctggcccgtttaagcctggctttcttgaccgcctcctggaaagtcatacctgatttctgcctgatatatctggaaagataaggtttagacaggttgaagctctcggccaaatcctccagcgtcacatcataatagtggttctgcacatatttcatgatatcgacaattctctcttccctgccctccttcacattctggctggccgccagtttgttggctgccgataccagtgcttcaatggagctcgccatgatatcttcgtcgattccaacgccccagaacatattgccctggttcatgatgccgacataggcggccgcctttgaggaagaccctcttgacaccgcatgttcttcgtagacattcagctcataggtgatgccaaagtaaagcttgattgcattgctgaccgcatcgaggcgtccgttgcctgtcgtctcaattacgcgtctttccttattctgttctattgttacctgggccgcaataccgtcctccgcctgtttaaagctgtagtccgcaatatgaaatacgctgcgcgggcagacatagtgatcctcgaaaatctggtaaatctctcccggggccagttcctgatgtttcctgtcggagacgcctttcaccagataacccacttcttctctcatcttatccggcacatcgattccgaaattctgtttcagtataaaggcaacgccgccctttccggactggctgttgatacggattacatccgactcatactcacggcccacatccgccggatcgatgggcagatagggaacatcccaccgttccccgctctttccttcctccctccaggccatgcctttggaaatagcatcctgatgggagccggaaaaggcggtaaataccaaatcacccgcataaggagttctctcatgtaccttcatgcctgtgagaatctcatatgtctctcttattttggctatgtggctgaaatcaagtcccggttccacaccatgacagaacatattcattgcaactgtgaccagatccacattaccggttctctctccgtttccaaagagcgtgccctccacccggtcggctccggccagcacgcccatctcggcatcactgattccgcatcctctgtcattgtggggatgaacgctgataagcacgctgtccctgtatttcaggttcttgtgaatgtactcaatttgagtggcgaatacatgaggcattgcaatctggaccgtggtcggtatattgataatcacctttcggtcaggtgacggtttccagatatcaagcacggcattacacacctctaccgcatagtcaacctctgttcccggaaagctttccgggctgtattcaaatgtaaaattcccctctgtctcatcggcaaggccctttaacagcacggcgccgtcaaccgcaattttcttgacctcttccttatccttcttaaatacctgctcccgctgtgcaacggaagtagaattgtagagatggacgatggcatgcggcgccccttttaacgcctcaaacgttttcttaatgatatgctccctcgcctgggtcagcacctgaatcgttacgtcgtccggaatcatgttccgttcaataagcgccctgataaactggtattccgtgtcggaggcagccggaaatcccacttcgatttctttaaacccgatctctaccagcatcttgaaatattccagcttctcactcagtcccatcggttccacgagggcctggtttccgtcgcgcaaatccacgctgcaccagatcggcgctttatcaatataatccttcgtcacccagtcgtaggtcacgaccggaggcataaaataagattttccatattttacttctgcattcattttcggttcctccctgttttgttaatgaaatcccgcccgcgggattctccgcggagcggtttttatttaacaggaggacgttcctgttaaataaaaaaatctccataaaaatgcctgtctgagacatttttatagagacgcaatgtaatcatttacgcggtaccactctatttcacggcggatacgccatgcacttaccggcactgtcatgccattcccctttttacggcgggagctccgtccgtacctacccaatctttaaaagaccttcagccggccgctctgaggccagttcactgcactttcccggctgcctcgcaccatccggcagctctctgtattttccgtaagaacaattactcttcctcttcttcgctttattctattcagttttaactttctttgtaaatggtaacatacttttctccgccccacaaggtacgattttaatcaattttattgacttattttatccttttttttatttttaagtacactcattgcgtatatttgaaagccgaccggtcagtttcacagttggaatatacaggtaatactaatttgagctgttatgttgacaatgacaatatcttgtgatatcctttaggaacaatacatttagataattttctaaacgtctaaatgttttgatacagtgaatcgaattaccacaaaacagaagggaggctgccatggctttcggagatacctttaaagcgctatccgatcctaccaggagggaaattctcaacctgctgaaggacggcccgatggctgccggtgacattgtagagcatttcaagatgacgggggcaaccatttcccaccatctgtctatcctgaaatccgccggcctgattgacgacgaaaaaaatgggaaatatatctactattctcttaacacgaccgttatggatgatattatgaactggattttaacattgaaaggggagacatccgatgaaaagtaagaaactgagaattttaaattacaccctggcagccatcggcatccttataactgccgccgtgtattcgcggctgcccgaacagattcccacgaactggggctttaacggtaccgtcacctacagcccgaaaagcagaatctggctgtgctgcggactgctgcctctcatggcattcctgtttgattatctgccgcaaattgatccgcgcagaagaaattatgtgaaattcaatgcctactatgacaccttttgtgttttcttacaggttttcctgctcattatgctgggaattacgctgagtgaatctttcttccccggtcatatctctgttgggaaaattgttacgctggccatcggagtcctgtttatgtttataggcaatatcatgccgaaaatcaagagtaatttttacctgggaatcaaaacgccctggacactgtccgatgaagaaatctggctgaggacccaccgtttcgcaggcaaaaccatgtttgccgcaggagctgccgcagtgattttgggctggtccataactgacagatggagcggctatgtcattgtggcaatgctgctggcaagcgcatttgtcccatgtcttatgtcttatatctggtggcgccaaaaatatggaacccccggctgatgccggcctgagcagaccgtgaaatatggtctgctctatttttatttaacaggagagttctcctgttaaataaaaacccctccgcggaggatgttactgttcacaccccgccaaaaagcggcgtgctgcgaacaataacacgcttcgcgtaacgcaaccgtgtgaacagtaaccggaggatcgcactctggaattttttctcatttttctattgacattttatttttattgggatataatctcattaagaacaaaatattaatagcaaggactttaatcatggtaaaacgtcaaacaattcaatacgctttagtttcagaaacagttaagaagatgaggaagcatgcaagcgcagatgagatttataatgccattgccaaagatcaccctaccatcggcagagggacggtgtaccgtaatctgcagcgattgtctgaactgggtgagatacgcaaaagggaaatcccaggaggggccgaccgctatgacttcctgtgcaccgaccattatcatgtagtatgcacaaaatgcggacaggtctttgatgttgacatggactatatgaaggatctggagaaaaccattaaaaatacccatgggtttgagtttacaagccacgatatcatttttaagggcatctgcccggactgtaataaataatacctataaaacaatggccgtatatcggaacaattacattgtcaatacatataggagtatagaaaccctgcaaagttacagttcagccttcggctaaaccgtaataaataatgcacagaaacggcaaaaaacgccgtttcgcgccgcacaactcgggattttcgcaaaaaacagtgaaaacacctcgcggaatacatcacggctgaactgttaccccgcaaacactacaataagaaaaggagaacaaactatgagaagtattaccacgttagaccttcaatacgcacacagattctttggattcaaaggagaagcacagtatttacacggacacacaggaattcttactattgaagtcgaagattctgtagaacccggcgttaatatggttttcccctgtaacgaaatccagaaaacagcctgggacgttttaaagaactttgaccatgctctgattctgagagaggacgatccgctgctgcctgcaatcctcaaggtttatgaggaacagggcattaaagacggcgcaccgcacaatcagatgaagggcccggcttttcacactgaccttgcaactgcttatccggaatgccggctggttgtcacaaaagagacgatgaccgttgagggcatgatcaagatcgtatacgatctgctgaaggacaagcttaacattgcaaaaatcaccttttcaagcggtgttaataaagcttcggaagagttccagacaaagaaccggatcgaccggtgcccgttgtgcggcatcgcattaaatgaaaacggtatctgcccaaaatgcggatataagaaacagtagtcggatttgattttaaacgcatcggaggtgcggcaggaccggtttaagccggttatgccgcacctccattttcagtcaggatttactccgtcgccggcacttctgtttgccagtaatgcagcgattgtaatcagaataaccgcaatgcctgtgacgaaaaaccacatatgcactaaaaacaagagccgacagccctataaacaaatcggcgcagatacagactgccttcctgttaaaccggtcaatcccgggcctgtgtcattcatttctcgagtaaaacaactgcccatccctcacccgcatccccggatccaccatcccgttcccgtcccggagcagtccccggatgcacagttctttgaccctgcttctggaaattccccattgccttgcaaataatgcatcaacccttatttttatggctccctccagagaaatctccgtctcatcccattcctgtgtgagacatacctccgaaagcttagtttcccggaccgtgtattcccccgcatgcaacacctgctccgccctgtttgctgcaaatacttcacggctgctgccatatctggccgccagcgccgcatcattgctcagaaatcccatatattccccgctgtccaggtcctttgccgcaatccgctcatagacggccatgttccaggaagtctcacagctttcgcagcggtatatcagccatatatccagcaggctcccgttggcgtttacacggaattttccgctgttttcatattccgtttttttaccgcacttcggacatcttctcaggactgccggaagctcctttggcaccacaagccactttattctgtgttttcgtgtcatttctaagttcctccgatgacaaccttaacacagcaggcgccggaactatacctccttctcacgccagaaatgacaatacgccgaaggaaccgtcctgcggctgtgatttccctgtgagatctaaaaacggtgcatccgttaatccgatgcaccgctctcattactctgatgtaagcttaaattcttattcctctgtgccagctttttttcctgaagcacaattcgctggatactcttctccgacagataaaactgttccgccagctcctgtaccttcattccctgccggtatttcttatatatctctctgtttcttgcctgaatttcttttctggcactggaagtctcaccccagcttttcctgttttcctcttttctggggatataaacgtatcctccgtccatataagactgaattaattccaccagctctttcggcaagatctcatttgctttctgatagcgcatcgccgcctccaaactatttttctgtccggatatagcaaaggctacacaattcattttcatttactgcataagcccgtgctatgcagctttaataaatttcatcataaaaatatgcctcctgataataccgtttcggtctgtaactatcctcatatcttgtccctgctaattgtatcataaacattagatgcaaaaaaccttatcttttctacagaagtattgttgtcctgttttaggcctcctgctgccgctatgtcctccgggcagccaatttcccatgccgtttctccgcttcacggtacttttccagttcttcatcccataaagtgtaatcccgctcaaacagctcttcgcacatctggtgtttcaatctgtcccaatccagtttttccatcagtttctggtgtacaaattttttactcttctgtttataggccggcagatgattaagagcgagaattttttgaagctccggacgccacaaaagagtaatttgaagttcccgcttcattttagggttttccgacgccgcttttttctcattaataaccatctcttttccctctgcttccaccacaataattccccaccaggaaggaatatgttcctccacatgcttttcatgtgattttccgacgacgacataattgacgtcacaatacttgttgtagtcgcgtatctgccgcttcaaacgctcatatgtatcggcgtcactctttatctccaggccgatcagctgacgttccgtcagcatgatgatatctgcccgggagcgtccaatgattttttcttcaaacatcctggtcttgccaaaccgctcctccagatagtcaaacaacggttctctgatgtctctgtcatataatactaatgattttgattccatctctgtattcatatctatatcctgccgttttctgccctcgtttctccaatatcccctataatatggctttttcctttgatcgtcaactgcatcctcctgcctttgttaaatcccggtgtcatttcaccgtcggccgttaaatttaaaacacaaaactacaaaataaatataacatagggaatgacttatctttctatctggtatataatgataagcatatcaagtaattagataatttttaccattttctggatattgaaggggttaatatgaatcttcgccaagcaatgtcacgttttcaaaacacaatatatgcccgggccgtccgccatggactgacccttgccatcccatttctgattatggggtctttcgctttactgcttacgaattttcctctcggcgtctaccaggatttcatccgtacctggatgaatggcgctgcttcggcgattctggaaacactgtatcaaatcagcctgggttctttggccctggttctgactgtaacaatcagtatctcctacggccatctgacggaaacggatcagctttttttgtaccctattgtcgcggtctgctcctacctggctttctgcggagggattgaaaaccagagtgactacatctttaatgcagaatgggtattcacagcaatggtaatcacgcttctgtcctgcgtgctgttccataaaatattaaagctgggacaccggttcgaacggctgcataccacgggcgccgattacctgtttaatatttcgatccagtgtctgatccccgttatcctggtctccctgttctttgccgttaccggatatgtcctgcgtgtggcatgggacagcagtaatattacgaatttcggttcctatctcttcctgaaactgtttgataagattagcgggaacctgttcggtattcttctctatgttgtaatgacacaccttttatggtttatgggcattcacggcactaatacattggaggctgtctcaaggcatctttttgaacaaaatgtggaaatcaaccagtctcttgtgctggcaggacacatccccacggagattttttcaaaaaccttcctggacacctttgtatttatcggcggctgcggtactgccctgagctttgttctcgcactgtacattgcttcaaagcagagccacaaccgtaaaatgtcctttgtggctcttccttctgccctgtttaatatcagtgagattgcagtattcgggtttccgattattttcaatcttacaatgctcatcccttttatcctgactccggtaatcctgacattgatcagcgcatcggctatcaagacagggcttgtaccggccgtaacacagtctgtggagtggaccatcccggttcttctcagcggatatcaggccacaggctccgtttccggcagcctgcttcagttattcaatcttttagtcggcgtctttatttatatgccttttgtcagacggagtgaaaaacaggaaaccgggaaatttaagcaggctgtccgccagatggaacaggatatggcggcgggagaacgtgacggcgttatccctgcttatctcagccacaaatacccgtactactattatgccaaaactctctctatggacttaaccaacgccatgaagcgcggacagctccaattgttctaccagccccagatctccagccagggagagctgcacggcatggaggcactgctgcgctggaatcatccggtgaccggttatatcgctccgcctgttctgatccgtctggcccatgagagcggcatcctgaacgaactgggttacagcctattggacagggcatgtctggatgcccaggcaatacagaattcagtaagcaataatatctgcctctccatcaatatctctcccaagcagcttcaggaccccggtttttttgataaaacgctggaaatagtcaggcagtatcccttagaacggatccatatcgtgctggaaattacggaacgggccgctatggaattgtctgccgaattgaaaaagaagatggaatatatgaaggaacaggggcttgaattcagcctggatgattttggaatgggacacaactcgctggtacagctgcaggagggctgctttaatgaagtcaaaatcgacggaaatcttgtctcccagctccccaacaataaaagcacgcgggaaatcatatccggaattgttcagatgtcccagaatttgaactgccgtaccatagcagaatttgtggagacagaggagcagagagatatgcttctgagtctgggctgtgtcatctatcagggctactattacagcaaggccctgcctcccgaggaatttttagaatatatttcccgtctgccaaagcaaaataaacgataacctgcacgccctgcgcacaggtcaccgccttcaataaagaggtgccgcaaaatcatcaaaacagatgattgagcggcaccttattatcaataaaactcctgccaatcttaattctctccactacttatgatacggttctccattcacaatccggtaactcctgtaaatctgctccaacaatatcacccgcatcagctgatggggaaatgtcatccttgaaaaactcagcttataatcagcccgctccagcacttttttcgacaggcccagggaacctccaatcacaaactgaatgtggctctctccccggactcccagaccatctatcagttccgccagttcctcggaggaaatcattttcccttctatggcaagagccacgacgtaagccgtgtctttgatatgagagagaatcctctccccctccttatctttaatctgcgtttccaccacctcactggcccgatccggtgtcttttcatcagctacctggataatttcaagcttacagtagcggctcagtcttttgctgtactccgcaatagcgtcctcaaggtatttctccttgatttttcccactgttatcactgttatcttcatactaagaaagctcccttttcagaaaggccagcaggttcactctcgccctgtcttccgtatctttttttcttctcttcacctttttaacgactttgccttccggcgcaatgcggagctggtagacgattttcaagaactcaccgacctcttcccatgcgtcccggctctccggtatcaaatcaagccccatctggaacacatgaaacataccgtcataaacagaggttctgacttttacacccgccttcttggctttgccggacacagacaatgtgtcgctgagcagaacctcgtagctgccaacttgcatgagcatgggcgggaaccccgtataatccccgaacaacggggataaataaggatttttcgtatccgcatcgccgatgtagctgcactgatacagcatattttcctttgaattgccaaacaggggatcaatctcataattcgattcatatgtctcaccgcttaatgtcacatccgtccacggcgacatcgtgatgacgcccccgggcagagggagtccgtgatccttggcatacatgcaaagcgccagtgccagaccgcctccggccgagtctcccgccaccacaatctggtccggcttgtagtttttctcgtccagcagccatttgtaggcatataccgcatcctcaacagccgccgggaacggattctccggcgccaccctgtaatcgatcgtaaggacatccgcaccgtagctgagcttcgaatattttactgcaaatctcctgtaaatgttcttcatcggtccgatgtagccgccgccgtggagctgaagaataaccctcccggtgacgacgctctggggtctcaaatattccattataaaattctctgtctcaatcagttcatagagaaagccggcagggcatctccatgccggttctacaggattctttctgaattctcctgtctgaatcggctttttaagagccgtttccatcacatcattcatcatatcgcgggtcaggtttcctatcatgctgacatttttcttacgcattcttcatctctcctttaaatatcagttaccgtacacggccttgccggaaagcgcggttccgtgaacagtaacacgcatcgcggtatctgcctggaccacattttctgcttaaaaataaaatctcctcttcagttccttcttaacgctcctatcccccaatatgatggtaatcaatagaacggataccgacagtattaccgtgataaccgacatcatcgggctggtaatccagccggccgcccatagaatcagggggataaagctgaaaatagtaatggcaatctgatacataaaatagctctgccagttcagcctgttgataagaatcaaaaacactatggctatcacatcgaacagaatcaggcttgggatcgcatagttcaccgaccagcccctgaaccccgtcatataatcaatcagcacaagcagtatctgcgcccctatcgactgtcttaccagaatccccgccaggcttgccctcctgataatcgaatacctcagtgtcatagccacataagcgattcctccgatggtgatcagggaccaccatattttaaccttctcatacgttaaaaagttaaccagaccggtaatcgcagcagcggtgagaagcaccagatatacaatgttcgtcatcttcctgagctttccccggtcataactgacagccggaaaattccctctgtcatacttcttatccacggccccattgctctcaagttcggctgccactcccctctcctccagaaaagagaaaaagaattcctgcagcttcagatcatccataacgctgttaaatgaaagatagattctgtccctgaatgctatcactccgcatttcagtttctgctgcctggacacgccaatgaggacgtggaacgcatccaccatattttccagttccggtttaattgataccggtcccaggtttgacagcgtcatggtatatgctttgctgctcttaagaaagatagcgttcatcgccatattcttgataaacagaggaataattcttatataccatttcttttcattcgatacattataggaaatcgtctcctccagacgttccttcacaatcttctcatccatctgccgtccgacctcggccagcacatcttcaaaccgttttggagccttccccttcggccacgcaatatttgtaacggagaaaaaatttgccagagtctcagaatcaaaaaagcttctcaggttaatcggcaggttcagagccaccggctgatccagagtgtttccatcggtatatacctgaatcagggaccaaatcagtgcggctgtcagatattttgtgatgctgacaccttcctgcttgcacagtcccttcagttgattaagccggatgctgccgtgaagtaccgactgacagtctaacggcagatactctcccttgattatcagagcaggctccgtctcataatggcggtggggacgttttttataatgtctcagataaccgtcctcctccatctggcgtatcgttttgtttgtatcggctcttgccacgggatccccttgacgggttgtttgtttttcctgtattccgggccttttcacttcctttgcttccagggtatcccttagcgcttcccgaaaccctgtttcttccggccctgccgcttctttccgtctatctgcctcttcccggtcccctgcttctgcccggtttgcttcatttccctgtccttcccgctcttccttacttcctggcttcccccggtcccccggcgtctcatctcttcctgtttcttccaggcatagttccaggtaatgttccgtcagactctttaaaaaatttaatgcaccgagcccgtctgtcaggccgtggaaaacctcaaaattgattcgttttccataatagctgacccggaagggaaagcggtggctttcatgaggatcaataaacttgcacgggtaggtctcttccttctctattaacggttctctgttatttgtctcaaagtaattccagaagaatcccttgcgcagcttcacacggaaattctcaaattccggcagcgtccgctcaagagcctgcgaaagcaaatgcggcttaacctcggcttttaacgacaccgagagccggaacacattgcttaaatcctcccctgccactgcggcaaacagctttgccgtattatccagttttctccagcgcgcgccttgtatgcgcggttttactccatccttctcatccacgatatccgtcactccaaatctgtcccggcttatttataattccagaagcatgtcataccagacagcgcctccatgtactgattccgaaactcccagattaacatatccaaatttctcataataatgaatcagcctgtccttgcaggtaagaatcaatccttttctccctcttttaccggcatcctctattaaataatccatcagctgcgccgcaattccccggttcctgtattcgggaacaacatccagcccaaagacgctctgataagctccgtccgccttatgcaggccgcagtcctcgaacatctcatcccgtatggtcttttcatcagtggcacagccattgataaagccaatcagcttcccctgatcctccgctataaaaaagctctcgggaaatgtcccaagccgtttttcaaacacctctctgccggccgcctcggccggagggaagcacctggcttccaccagggtcacgccatccaaatcgtccatatctgcctgtcttattcttatattatccatcttcatcccgccgctttctccgtttaatccgctctttcgtctttccatatgatcttcaaagagcctgcactgcggcagactcttcaacagggccggcttctttcccttgcccgcccctccttctatgttctgtacagctaagctctgaaataataccctactccccatttggtatgaacatacttcggttcactcgggcttggttcaatcttctctctcagacgccttacatgtacgtccaccgtcctcacatcgcctccggcagccgctttattcccccatacaaagcgcagcagttcttctctgctgtaaactttattggggttgcagacaagaagctccagaaggtcaaattcctttgccgtcaggttaatctctttctctgcaataaagacgcgtctgctgtccgtatccagctttaagtcccccgcctggactacttttccgctgctctgtgactcttttttcgattttttggcattacgcctcatgatcgccttaatcctggccttgacctccaggatattgaacggctttgttatataatcatcagctccatattcaagtcccaggatcttatccatgtctccgccctttgccgttaccatgataatcggcatctccgaaaattcacggatcgcctggcagacctcaaagccgtcgaacttcggcagcatcacatccagaagcacaatatcatactccgtctctttagccatccggatagcctcttccccgtcgtacgcacagtccacttccataccgtcctgctctaaactgaacctgattcctttaacaatcagtttttcatcatccacaactaacacttttgccatttttccacctcatacctatcattcacaccgtaatgtcttcttttatcttctgaaaagctgcttccttaattccgggaacctccataatatcttcaattctggcaaaaggcccatattcctggcggtaagcgatgatcgcctcggccctggcctccccgatccctttcagcgtcataagctgctctttcaccgccgtattcagattaattttagaagtcacagcaccgccgtccgccccagccgatatatccggataggctgctgcctcccggctccactggacggcctcttcccggtccggaatctgtaccttcatgccgtcttccagtttcccggccatgtttaaaaaatcaccggcagcattttccgtcaagcctccggccatttccaccgcctggtaaatacggcttccttctttcatctcatatactcccggagcggccacttcaccgcatacatgtacaaaaatccggccggccccgttatccgtttcggaatcaccggtgttccctgcatattccggactatgattttccaccccggccggcgccaaggcatccgtaccctcctccgccgtctcctcctgcagagcggtcaaatgaaactgcgccgtgtcaccactgcctttccactctacattatagcatatgactgctgccagcattactatgccggctgctgctgttttaatcattcgtgctgtttcttttttcatatgtaatgtacctcccgttcatatcggaagatactgtttgcccgtatttctattctatctaaataccaccctgaacacaagcgaaaaataaaagaatttccctgtcaccacctgaaaataataatcccggcaatggcaaccagagcgccaatggccttcttccattcaaaaccgaccttatccacgccaaaaagccccatcacttcgatggcataggcaacaataatctgagccactacaatcagaagcgcggatttagccggccccagcgtacccacactctttataacggtataggtaatcagggcgcccatgatacctccggccagcatatacttcggttctacctggaacaggcctcccacttcattccggcctgtaaaaaaccacatgattacacaggcaataaatgcactgaactgcacccatcccgatgacacccagatactcgtctgctttgtcacttccgtgttaaatacgccctgtatactcataagggcaccggaaaccagggcgataataaatccccacataataaaacctccgcattctattcgatattgcttattatctcataggtgcggaagttttatactttcaaaaggaatttacttatcttaatgaattttaatcgatagaaaagtccaccgcaatattggcctcaatctcaacctcacccggcatcactcccatatccatcatggccgcttccttggctgcggctccggctccggaagaatatccattataccgcacagactgattatcaccgtattccctaatatttgcaattttaccaagcttgcatccgcccgcatccgccatggcctgtgccttcaccttcgctgcatcaattgcttttgcaagagcctgctgatatgcctcattgtatttactggacatatagttgacagaatcaattgaattcacgccggcatccacggattctgagataagctgccctacctgatcaatcggaatatcagataccgtgacctgcgttgtcatctcatatccgctgaccgtctttccgtcttcccagttgtaaatcggactcattccataattggatgtctggattgatttttcctccactccctgttcctttaacattgtgagaaccttatccaaatctgaattattctgtgtctggcatgtcggagcatccgacgcctgggaataaacgctgtaaatgatttctgctatatcaggctccaccttgacctgctccctgctgctgacgctgattacattattttccacattctgtacattgatcgtatccggtattgcagtgcttccacaagccgtaagagtaagggcccctgccgagataagaacggctgcaagccctgtttttaaatgattcataagtatttcctcctcttctttcctgttatatagaaaaacatcctgaatgtctttcagctataatcattataaccgaaagacatccaggatgtttttcttttaccttaactttccatatcttatttctgaaaatatcacttttcacttccggcttcttcctgagccagggctgcgtttacaaggcgcctcgccagaacggcagtcgttacgttgccaatccccccggtacgggagtcgcacacgctgcaacagaactaattgcatcaaaatccacatcgccgcacagatggccgttctcatccacattaattccgacatcaatgaccacggccccttcctggacgtagctttcgtctatcattctggcgctgcctgcacaggttaccagaatctcagcccggcggcagatatcctgcaattccacagtctttgtatgacagaccgtcacagtggcattatcctgcagaagcagcatggccagggggcgtccgacgaccatgctccggccgaccaccaccgttcttttacctgccacgggaatatcatacagcttcagtacattcatgactgcttccgcggtacatggagcaaaaccggtgctgtccccgctgaatacctttgcaatattaacgggtgaaatgccgtccaaatctttcatcggatcgatcattctctcaatatcctcctgaacaatctggggagggagaggccgcatcaccaggattccgtcaatccggctgtcctcatttatcttcttaaaggcctccttgaactccctgtcactgatatcttccggaaaaacaaacttttccactttcagtccaaaggcatgcatctttttcacagcgcctgtttcataagaaatatcgtccgggctgtcacccaccctgacgatggcaagttgtggaatccgtcccagccttttcagcagctcttccacctgtacttttaattttgctgatacttcagctcctcttaatgtaatcattctgcccctcatttcaatatactacgaatgccgtcaaccattctgccgctaaaactccccctgccagttccagcaggtaaaccgaaataatcgcggccacagcaaccactaccaggctcttgcccctgtagccgagaattaccgccaccagcgttccgccagccgccgaataaaaatgcccggttgagaaaaagacatccgggaatgtcaaagcccccaaaaccgcatagggggtataatccagaaaagagcgtataaatctggacttaatctcttttctgaaaattgtgaccggaagtaccctgggaatataagttaccagcgccatcagtatcacgcatatcacgactctcgtcagattcactcaaaactcccccctcttctgttatttccggcgctgccgcagtctcctgcccgtcttccttttcctctccgtactcatccgagggaaacagccgcgccccaagcgcagaggctgctatcgtggccagaattacccggaacccggatgagataaacccaaaaaccggtatgtattttaaaatgcatgtcactgcaaccgccgcgcctattacgcacaatacagctacagatttcctggcggcaggaatgatcagtgcaataaacattgcatagagtgcaattcccatcgcattctgcagagcctggggaagcagcgccgatatggaaccgccgagcagcgtgcccaggttccatcccagaatcggcattgtcatcaatccaaacataaaaggagctttcagttgtccctcatgcagagagctgacgacgaacgtctcgtccgtgattccaaacgcaagaaccagccgttccagcgtacctgtggtccgttccagcttctgggaaagtgaaagggacatcagcatgtatcttatattaattacaaatgtggtcagcgccacttcaaaatatccggaaccggccagaatcagattcgttcccgcaaactggcccgcactcgtcaggttagtcagggatatcatcaccgccacccaaaccggcagcccgcctgaaaccgccagaaatccaaatgtaaacgaaacaggaagatatcccattccaatgggaataccgcttttcagcccttccctgtatgctcttttccaactcatttttactttccctgccttgttaattctaaattaacccaaaactctgcggtcattataccatgttcctgacggaacatggagtctccgacggaaatcagcgccggttttctgcggtgaacgcagaaaccgtttatgcgcagtataacggcgtgttttgccgtttctgtgcatcgcgaagcgtgttttgttcacagcacgccgcttttgggcggggtgtgaacagtaacctgttaccggaaattttcgtgccggctgttcagccacgcgacaccgcttacgattccttcctcggtaaacggaaaatactcgcttgtcttctgttccggcggcgtggcgtcatagccataaggctccggccacaccgtaactttcagaaccgtttcttcctcttttgaagctttctccatacggtagcgcatgcctgtatcgcttccggtaaaattttcttttttaaggaaattgacaggcatcacgtcttttcgttctatcattgtccgcctcctgcactgtaccgcctaatgaaatttatattttctgactaccgcctgcaggctcttattgccgttgtattcatttatctccggatagtaaacgatgtccattacccggcggccgcctctctcatcttcaaaagcaattccgtccccgaaatatatggcctccattgcaaaaccgttttcctcctccagcgtcagtctcaccacgttcctgttccttccgataaccctggaattcctgactctcaggttcttctgcgcaaacagaggtttttcatttccctggccgaacggttcaaggcaccggaattctcttatcagccgttccgtcatataatttaccggcatcggcacgtcaatccagaccttggccttaaaatcttcctccctaagtccggacctttcattgagctgccttctgaattccccgatatttttttcctccagggaaagtccggccgccatcggatggcctccgaatttcagcatcagctctttgacctcagacagcttctggaacatgtggtagctttcaatcgatcgtcccgagcctttgactgcctcttccccttcgtcagtacgatggacggtttctggtaatgttccctcagacggcccgctataattcctgccagtgattcatggcattcaggcagatatacaaccagcaccttatcctggctgtaatacgtatcgacctgaagtctggccgcctccgtcccctgctccgtcatatccttccgcatatcgttaagctcttttaactccgtggccagccggtcggcttcctcctcatcaccggacagcagaagcgacagcgcaagctttgccgtctgcagtctgcctcccgcattcagacagggaccgattacaaaaccgatatggtatgccgtaatctgggataaatccagattgttcttggcagccagctttctaagtccgatgctggacgtgtgttccatcctgctcagaccatattttacaatgatcctgttctcatcctgcaggcgcatgacatcgcctaccgtggcgattgccgcaaattccagcagttcttcccactccttcgccggtacaccgcactccgcaaacagcacctgcaccagcttccatgcgacaactgctccgcagatttccggaaacggataagagcattcttcacgttttggatcaatcaccgcgtcggcaggaggaattatctcttttccttcttccagcggcacctcatggtgatccgtgatgactaccgtcattcccttctttttggccagctcaatctgcgaatatgccgatatgccgttgtcacaggtcagaatcgtgtcaattccctgctccgccgccttttcaataatcgattcattaattccatatccgtcccggatccggtcagggatatcgtaatccacaggagcgccgagcctgagaaacgctttgtataatatgtaggtagaacacactccgtcgatatcgtagtcgcccacaatccgtatcctttttttcctgtctatcttgtcttttaaaatggccgccgctttttccatatccttcatcagtctcgggtcatacagtgttcccactgtcccgttcagatacaggtttatcctgtcctcaccttcaatgccgcggtttctgataattctggccgtcaccgggtcaataccgaaacgctctgcgattctgttaaaatccgctttttttgtctgtaccatccagacttcttctgccatctgttcctctgcctttcctttatctgttcgtttacgaagcggctgagccgcttatatcctatatgccttcagaagccgccgtctttccttgtaatcgggcagaatctgcgccacctgcatccagaaacgggccgaatggttcatctccagacggtgggccagctcatgcacaatcacataatcacacagcggttccggcagcagtgaaagcctccagttaaaattcaggttgccggccgaactgcagcttccccatctcgtcttctggttccggattgtaattcttccataatccactttcatcagagatgcataataagaaacccggtgttccagcaccgggcgcagcttctctataaaggcacgtatttcctcttcaccgtataccggccgttcccgcttctgctccgtcactttccggtagtttcttccaatccatccttcatggctcatggcaaatttaaacgcctccttctccggcagtctccgaggcagtcgcatcacaagatgcccgtctggtgctatctgaagtgccatcgtcttcctggacgaacggattatctcaaatggtatgctgataaattctcccgtaggctcatccccacatggatgagggttccaggggttcaaaacctgcaaatacggcatagaattttccatccctttcttcaaccgtctgtgccgcatcttccagcaccgtttcaagctttgcctcaaatttctttacaggggcgtccagtgccgtacagcggaccagttccacgcagacattcccggccgctccgtccgtcagcatatcagacagggcatccagattttttccataatagtcgggaaacgccagtttttccatcagataattatgcacggcctcctcgctctccatctcgttcatatccagaagcaaaagtttcattctttatctcctcctgtcttatatcaatcgtctttcttatcataatctgttatcattatcagtaaatctgttcaaatgttttataatgatccgccgtatagtatatcaggccgtcgttggaataaacaagacgctccgcattccggaagcctccttcatagttgatgtcgcattcaaaccacttccgtccatccttatccggcaatatctcttcataattaccgaaagggcttcctcctatactctttccgggcgccacatcccaaagattgccttccctgctcacccagccggcattttccgcctctttcttggtgataaaattgcccggcagcgtcccatatatatggatataaagggcaacatcctctttactggtataacttccatctttatcaagagcaagggcagaggtctccgcctgccctgcctgctcctgatgtaccggcatgtccgcccggctctcctgcgtctgtgcagggccgcagccaaacagtaaaaatatggccagaaaaaatgggatcagccattttacaaaagatctgactttattccagtattcgattatcataatttcctccttcaggcaccggatgcctgatttgtgcagcgtaactgcagcttatatattatataaggcattgcgggaaaagtcaaatatctgtacaaaaagaaccgccctcagacggttcttcagatagtttttatttaaacagcgtataaatcaccagtgttaaaaagaacaggcagatgaagatatcggtcagcgaaattataacgcccgcgatcagaacctttaccattatgccgctgtaaacacctgtaattaatacgagcaaagacagcagtaaaaatataagcagctcaaagcatgtcagcagatatgaaaacagaattgtcttataatgccctgttgcttttatctcttctgttaatttacttcctgtaaaggttaacaaaattgaaaccgttgttataataaagcccaataatgtcgcccaaaccccgattatcacttgtaatgaagcaaaataagattctgccgtcacattaaccggtatcagtaacgaaaaaataattgatataactattggaataaccgcaatgccaccgcgtctcaccctatgttttcttttactcatcgtgcatccttctttctttttatgcaccgcttactacatcattatagaattcaattattgtcttgtacatttcatttgaatcgatcaccttatcattcgtgataataaattcttttttacataccagtttatcactcagaagatcgacactgtctttgtacagtccctgacttacgcggaaagactttatctcctccctgttctcaataacaatttgttctaactccttaatattaaccggcggccgaaatccttttttattcctggtaattcttctcttcaaacttatttcgtaagtatccacctcatcgatgtcgtcaaagaatgcgcccagcagtcccatgccgtcccggagcaccttcctcatggacggtgtgtttttcaccccaatctcaaacagactgtagcccctgttatcagcaattctctcgaaaacatcttttcgcagttttcccgtgcatgatacgtatgccaccttcgaaaatatcctgggcaggtaatcaattattgcactgggacgcgctccattaaaattcgtctccgcccccatgatattcttctctggaaaaatgacacaatgagttacctctgccacgctgtaattatcctggagtttggaaaataatttttccagcttcccatccttctccaaataaggccaggcgtctttcctgcatagcactattttaaactttattcctttcgccgtatcaatatcctcaattttatttatttcttccacaagaatatagatcttgtcaccatgaaccgtaggacattctatttttcgaagagccgctttcagcgccgcttcctcttttaggccatcaatttccaaattcgcctgatagatatacttaaaggtttctctaattaccgattcctgatctgcatatggtatgacctcattatgttccccatgggcgtacaataaaatatcataataatagatttttctttcaatttttcctgaatccatacagaaaatcccccatcgacattttattacattataacataaaaaccgggccggtgagaacttttactgaaataagaatttcctgcaaagctgctgtagaatagagtctgtcctgggagactccccaataaaaagcaaaaaaatcccctggagaaactctccaggggattcgtacgtgcgtgagaagattcgaactcccgacaccttggtccgtagccaagtgctctatccagctgagctacacacacatattaaaggacattgtccttaacaacgatactaattatacaatgcttttccataattgtcaactgaatatttcgcttttttttatccttttcaccgcggcatggaacagtgcagacagcatgaactgttaccgccgcatataattcctaagacatgcatacataacctccgcatcaatcggtttcgtcaaataatcattgatccctgcttccagagcttcctcccgttcctcactgaatgcattggccgtcattgctataatcggtatggttttggcatcccggcgttccatctcccgtatcttttttgctgattcaattccatttaaaacaggcattctgatatccattaaaatggcatcataccagcccggcacagttttttcgaaggatgatacgccctctgcgccattcaccgccgtctcgcaccggattcctgtctgttccagcagcatcacagcgatttccctgttaatttcattgtcctcgaccagcagcaccctcttgttgcgaagggaatcttctctgtccgtttccctatgctgcgtctctccaagctttcgaaccttctgttttttatctgaaattttcatcggaattttcaccgtgaagacagtccctttgccaggctcactctcggcactgatggttccgttcagcagttcaaccagctttctgctaatagaaagcccaagcccagtgccttcaaatatccggctccctccaaaatcctgttgttcaaaggggtcaaacatccgggccataaactcctccgacataccgattcccgtatcactgataataaaccatatgagctgctccccgcttccaccttccccgccgtaacgcacagacgtatttccccctgttccggagtatatttcagtgcattgcccagcaaattcagtaaaatttgattcagcctcagactgtcacaataatagaactctcccacctccggcgcaaccgaaaccagaaatgtctgcctccgctcttctgcctgagcctcaatcatcacctttatattgcgtatcgtgtctttcaaattcatttccctgttggcaatcttcatctttccgctttcaatctttgacatgtcaagaatgtcattaatcagcgacagtaaaaaagcagacgacatttctatcttttccagacaattaagcagctttgcataattccctgttttttcatcacactggagattcgcagtttcctttgcctcactctgcagcacaaaccttgcgaccgacgccattccgacgataacattcattggtgtcctgatatcatggctcatcctggatagaaagtctgtttttgcttcgttggctttctcagccatagctaacgcgttctgaagctcccgctgctttctctcttcctccttctttacgtcatcgatgtccttcagatacaacatgacccgaatgcaatcggtagtcatctcagacagacggacatataaagaatgccaccggtaagaaccggatggagtcagacgccggtaactgattgtaacctccgatttgccgttttcaaaatcctctttcagtcggtcaggcgataatcggctcaggaagacctccttctcttcgggatgtacgatggtatctgccgcccattttatctgctctgaaaaggaagggctgaaacgaaaatatggagtcgatttttctcctttccactgccgcagataatccgtatacaattccccctcataaatttcgtcataagactcgtttactgccctgacaaagcgccggttcgcctgtctctctctaatacgggcttttgccaactcgtccgtatcgcggtatgtcagcatcattttttcagaaatgccttccctgtctttataaaatattccaattaattcgcagtaacggtactctcccgacctgtcttttctgcggacttcggctgaaatcatttgttgtctttccctggcacggtttcttatattttccagtgcaaatgaatcataaaacacctgcctgtcatgaggatgtattaaattttctccatacaggcggttaaaatcacaaaagtctgcttcctcaaatattgtatccggcagtccgtcgctcttataaacgagatatcgtccggtacttatatctaaaagaaatacttcaccaaataaacgcattgcgcaaagaagaagttctttctcctctttcccgttttcttccgtcccactcatcgcgtaaggtttaacagaaattgcaaaagccggtgtttttttctctccccactctatttcagatgctgtgagcattactgtcgctccgaatgtctcatcgaaccctaccgcagagtatggttttttgcttccaatgccgctgaagatacaagcttccttgtatcctgtccaaagttctctgcaaaaatctccttttcgaatgccgggtaccatttctccgacaatatcattaaaatacaaaattctgtagtcgtcctttcgtaccacatatacagccgtatcccccaggctgtttaatagaatctcaaacatcgaatcagctcccatcagtccgcccctcctggtcagttaaaagataaatttccatcagacttttatctggttattatatacgaaaccatgaaaaagtaaacaaacacctgccttcaatcaagaaagaatcccacgagcgggattctttcttgattgaaggcaggtcgcttcggcagagaactttcctgttaaatgaaaaaaccagaaatccactatgtagattactggttttcctttccaaaataccgcagatgggagcatgcaaactgaaatttatgaagctactttaaaaattccattacttcttctaacgaattttttcccaaggtaaattgctctaatgccatatatcttttttctgcaatggtgtgttctttttcacagcatacctttacaatttctgcctcgccgtctaatgacttgttcacgtttgattttgtctgataagcctcaaaatatcttataccaaatcttctttgagactctgcattaatgtgaataccatcaggatttgaatataatttttctccagttacaaaataacaattagtattattttctgcgtatctgagtaattcttgattaactaattcatattctacacaactccgcccaaatgcagattttcccaaataatcacccaaaccgccaacaataaacgggacctccaaaacgctcaattcttttctgaatgaattaaccatgacattaagtttgtgataataatctttatattttccactatggctatcactttctccctgatgccataagattgcaatcaagtcgctagtttccatagcaaacttcgcctcactaattgcatgacgaaataaagctccttcaacattccattcatcaatagaactaccaccttctgcacaaggaatcagtccaacttgttcattcttatttgcattacaccatgcctgtgcaaatgacgctgccggaccaataccagcgaccgatctatcaaagtgaatcggttccgccatcatctgccacctgccgtttctgagcataaggatattttcattataaattggtttgacctcatgtaaaaatccacgccctgccatattggattgtcctatcagtaaaacggatttcatttttaatctcctccaacctaaacaaaaaaaggttctatactgaatgttggggtgtgctgaaaagcacacttccaacattcttttcgttgtaataaaatacatctataagaagcctcctaaacgcattatcccgaccaaagtttaatgttatggaggtgaccccttatagatgtaccctaattataccaaggctttccttaacttggaaggtgtttctattaaaaaagtggttcaggcagactctttcattaaaattttcatccagtcccaaccggtagaacagacttgtccctgctgtggggctaaaacaaaacggattcatgattaccgtttacaagaagtccaggacattcccttactgggaaaacaagtaatcctgcttcttcgcaaacgccgctacctctgcccatactgccgcaaacggttcacggaaccctattcgttcctccccagctaccaccgcaggacccgcaggctggcattttacattgtctccctgctccggcagaccttttccttaaaacagatcgcagagcttaccggtgtttccgtccagacggtctgccgccttctggacacgatttgctatcctccgcctgaccagcttccacaagcgctttccattgacgaattcaaaggcaatgcttctaccggtaaatatcagtgcattctggttgatccgaaaaagcgtcggatcctcgacattctcccagatcggacccagagccatctggctgattattggcggaacattcccaggaaagaacgcctgaaggtaaagttcttcgtctgcgatatgtggcgcccctacaccgaacttgcacaaaccttctttccaaatgctacaatcatcgtggataaatatcatttcatccggcaggtgacatgggcgattgaaaatgtacgcaaacggctgcagcgctccatgccggtttctctgcgtaagtattataaacgcagccggaaactcattctgacccgctacaaaaagctgaaggatgagaacaaacaggcctgtgatttaatgcttcactatagcgaggatctgcgtctggcacaccgcatgaaagagtggttctatgatatctgccagatggaagcgtatcgtcagcagcagagggaatttgatgactggattgcgaatgcgcagagctgtgggatcaaggaatttgaggcctgtgctaagacctacagggcctggcgaaaagaaatcctgaatgcctttaaatacgggctgacaaatggtcccacagaaggatttaacaacaagataaaggtattaaaacggagcagctacggaatccggaatttcaaacggttccgaacccggatacttcactgtacatcataggataaaaaggtcggtaatgcggaggcttatttggcatgcccaaaatcagtaaaacctggaactaaacataaaaagggcccttttcatagaattggggcgggattttaacaaatcccaccccaactattgacaaagagcccaaaaaaacagaggaaacgctgttaattcaacgtttcctccacttttcactaatgccgcagaccggaatcgaaccggtacgaagtttaaccctcgcaggattttaagtcctgtgcgtctgccagttccgccactgcggcatatctgtataaaacagataaatggggcctatagggctcgaacctatgaccctctgcttgtaaggcagatgctctcccagctgagctaagaccccaaataaaatgagttctcacacttaaatttcattaaatgctcaaactaacgacccggatgggactcgaacccacgacctccgccgtgacagggcggcgctctaaccaactgagccaccgggccaaatctttagttttttgcttttcttttcctttagttcaggatagtggaccttcgggactcgaacccgggaccgaccggttatgagccggttgctctaaccaactgagctaaaggtccaaaataaaataactagagccgatgatcggactcgaaccgataacctgctgattacaaatcagctgctctgccaattgagccacatcggcttgatgaccccaacgagattcgaactcgtgttaccgccgtgaaagggcgatgtcttaaccgcttgaccatggggccttactgtttacagcgactccatagtttgttcttcccgctgttaatcgcttagttatattaccatatttttgacatattgtcaatttttctttggctattttttgatacaaaaaaactccccgagtaggacttgaacctacgacagcgcggttaacagccgcgtgctctaccgactgagctatcgaggaataaaggggaatgtctggctctctgaacaaggctccctaccggttatcttgcccagatttccattacatataccttcaaaaccacatattgaaattcatccgtttaaatcataaggaatcgcttcctctatcctatccttaacctaaccttttggttaagccctcgaccgattagtaacagtcagctgcacatgttgccatgcttccacctctgccctatctacctcgtcgtcttcaaggggtcttactcttgcgatgggatatctcatcttgaggggggcttcacgcttagatgccttcagcgtttatcccgtcccgacttggctactctgccatgggtttgatacccaacagatacaccagaggtcagtccatcccggtcctctcgtactaaggacagctcctctcaaatatcctacgcccgcgccggatagggaccgaactgtctcacgacgttctgaacccagctcgcgtaccgctttaatgggcgaacagcccaacccttgggacctacttcagccccaggatgcgatgagccgacatcgaggtgccaaaccactccgtcgatgtgaactcttgggagtgataagcctgttatccccagggtagcttttatccgttgagcgatggcaatcccactttcataccaccggatcactaagtcctactttcgtacctgctcgacccgtcggtctcgcagtcaagctcccttatgcctttgcactctttgaatggtttccaaccattctgagggaacctttgagcgcctccgataccctttcggaggcgaccgccccagtcaaactccccacctgacattgtcccaccaccggatcacggtggctggttagaaatccagtatcacaagggtggtatcccaacagtggctccaagaagactggcgtcctctcttcacggcctcccacctatcctgtacatgcaataccgaatcccagtatcaagctggagtaaagctccatggggtctttccgtcctggcgcaggtaaccagcatcttcactggtatttcaatttcaccgggtgcattgttgagacagcgctcaaatcattacgcctttcgtgcgggtcggaacttacccgacaaggaatttcgctaccttaggaccgttatagttacggccgccgtttactggggcttagattcaaagcttcgcttgcgctaacctctcctcgtaaccttccagcaccgggcaggcgtcagcccatatacctcaccttacggttttgcatagacctgtgtttttgctaaacagttgcttgagcctattctctgcggcccactctcgtgggcaccctttatcccgaagttacagggtcattttgccgagttccttaacaatgcttctcccgccggccttaggattctctcctcatccacctgtgtcggtttacggtacgggtacatatcacacaatagcggcttttcttgacagcccctacgccaacttcgctactaatgttcgctacgcgtcacgtcctcctgttgttaagcggatttgccagcctaaccagtcctacgcttgccccggtcttttcattcccgggtttgacttcggttctgtgtccccacagttctgatgatatgcagtacaggaatttcaacctgttgtccatcgactacgcttttcagcctcgccttaggccccgacttacccagagcagatcagctttactctggaaaccttagatattcggcctggaggattcccacctccatctcgctactcattccggcattctctcttctatacagtccacagctccttgccggtactgcttcgctccgtatagaatgctcctctaccaatcatattaatatgattcctaagcttcggtgttgtgttttagccccggacattttcggcgcaggacctctcgactagtgagctattacgcactctttgaatgtgtggctgcttctgagccaacatcctagttgtctttgaaatcccacatccttttccacttaacacacactttgggaccttagctgtaggtctgggctctttcccttttgactacccaacttatctcgtgcagtctgactcccgtacatcatctgtctggcattcggagtttgatattcttcggtagactttgacgccccctaggaaattcagtgctctacctccagcagactaatacgaggctagccctaaagctatttcgaggagaaccagctatctccgggttcgattggaatttctcccctatccacacctcatcgccacccttttcaacggatgtgcgttcggtcctccattcccttttacgggaacttcaacctggacatggataggtcacccggtttcgggtctgcacatgctgacttgacgccctattaagacttgatttctcttcggctccgcaccttaagtgcttaaccttgccagcatccgcaactcgccggaccgttctacaaaaagtacgcggtcgcaccttaacgtgcttccacagcttgtaaacacagggtttcaggttctttttcactcccctcccggggtccttttcacctttccttcacagtactatgcgctatcggtcactaaggagtatttagccttgggggtggtcccccgacttcccgcaaggtttctcgtgtctcgcggtactctggatcctgctgctgcctattgttttcatgtacggggctttcaccctctctggctggtctttccaggaccattccattaacaaatcggctcacgtatgcagtccttaaccccagagtgcacgcactctggtttgggctctttccctttcgctcgccgctactcaggaaatcgatgtttctttcttctcctccgcctacttagatgtttcagttcagcgggttcccttccatacgttatggattggcgtatggatacttgaggtcttctcaagtgggtttccccattcagatatctccggatcaaaggatatttgctcctccccgaagcttttcgcagcttatcacgtctttcatcggctcttagtgccaaggcatccaccctgcgctcttattagcttaaccaattgacttccacctgcgggtgcgggttttagtctaagattcatagcgttgaatctttggtttaggtttacaataaaatttttggtttgttttggttacactttcgtgtaacacctcggatgtcttgattttgtctctcttttctcccttgtggcaagccactcggaagagtttcgaaactctatctagatattatttcaatatgcagttttcaaggtacatgctgtgcgcgttcactactgcgaagcgtccgttccaaagccttcggctttcgctcgcgcaaatggagatggagagattcgaactcttgaccccctgcttgcaaggcaggtgctctcccaactgagctacacccccatgttctgtaatcaattgttttccatattgattacctgcttacatgccatcatgccaagcatgattcctatgcatgtaacacctctcaagagatgcgggtctaccctaattaaaggcgatcccatatttatttcatttattatattgaattcagccgtttatcctgtcagtatgctgttctcgttccacggcattaccctctcgggtaatgggcttaagtggactcgaaccaccgacctcacgcttatcaggcgtgcgctctaaccggctgagctataagcccattaatctggcagccacctgctttcccatatcgtctccaatatagtatcatcggccgcttaggtcttaaccatcgtgttcgggatgggaacgggtgtgtcccctaagcgcatcgccaccagaaatgttgtttccaggttttcatcaattgcagctccaaaagctgcgcaattgactcgatatcctcgaaaactcaacagtatataaaacctttacttcttcttccttagaaaggaggtgatccagccgcaccttccgatacggctaccttgttacgacttcaccccagttatcggtcccgccttcggcagctccctccttgcggttgggtcactgacttcgggcgttactgactcccatggtgtgacgggcggtgtgtacaagacccgggaacgtattcaccgcgacattctgattcgcgattactagcgattccagcttcgtgcaggcgagttgcagcctgcagtccgaactgagacgttatttttgagatttgctccacctcgcggtcttgcttctctttgtttacgccattgtagcacgtgtgtagcccagatcataaggggcatgatgatttgacgtcatccccaccttcctccaggttatccctggcagtctcccaagagttcccggccgaaccgctggctacttagaataagggttgcgctcgttgcgggacttaacccaacatctcacgacacgagctgacgacaaccatgcaccacctgtcttctccgccccgaagggaaggggacgttactcccccgtcggatcgatgtcaagacctggtaaggttcttcgcgttgcttcgaattaaaccacatgctccaccgcttgtgcgggtccccgtcaattcctttgagtttcattcttgcgaacgtactccccaggtggaatacttactgcgtttgcgacggcaccgaagagctttgctccccaacacctagtattcatcgtttacggcgtggactaccagggtatctaatcctgtttgctccccacgctttcgagcctcaacgtcagttatcgtccagtaagtcgccttcgccactggtgttcctcctaatatctacgcatttcaccgctacactaggaattccacttacctctccgacactccagttaaacagtttccaaagcagtcccgcagttgagccgcgggctttcacttcagacttgctttaccgtctacgctccctttacacccagtaaatccggataacgcttgccccctacgtattaccgcggctgctggcacgtagttagccggggcttcttagtcaggtaccgtcattttcttccctgctgatagagctttacataccgaaatacttcttcactcacgcggcgtcgctgcatcaggctttcgcccattgtgcaatattccccactgctgcctcccgtaggagtttgggccgtgtctcagtcccaatgtggccggtcaccctctcaggtcggctactgatcgtcgccttggtaagccgttaccttaccaactagctaatcagacgcgggtccatcttgtaccaccggagtttttcacactgtatcatgcgatactgtgcgcttatgcggtattagcagtcatttctaactgttgtcccccagtacaaggcaggttacccacgcgttactcacccgtccgccactcagtcaatccaacttccatccgaaaacttccgttaaatcgcttcgttcgacttgcatgtgttaggcacgccgccagcgttcatcctgagccaggatcaaactctcatgtttaagttttgattccgttcaaaaattcgcttggctaatttttaaaccgtattactgttgtttggtttttttgttctgaatgttctctcgaacttctaggcttaaccaaaagcctttgttctttaagaattttcaaggttttacatactgttcagttttcaaggttctttgcatctccatctaaagcttgtccggtgatgctcacgcagaaggagggatttgaaccctcgcgccgctactaacgacctactccctttccaggggagccccttcaacctcttgggtacttctgccggttgatttcttatttatatatgaagctgtgcattatatttctcaaacggagagagtgggattcgaacccacgcgccctttcggacaaacggttttcaagaccgcctcgttatgaccacttcgatatctctccaaacgtgctttcatattttacatcaggcaattcgttttgtcaagcacttttttatctttttttgaattttatctttttttgatttaattcaagcatttgataaaatatatctcggcagcctccgaaaacggttgtttatcagggctttgtcgcttgctgtctcagcagcaacgtcgataatcttatcatgtctttcgccaagtgtcaactacttttttcaatttttttcattttttattttctgccttctacagcaggattcgacccgtctcaaatttactgttaattcaagcggccgcaggcagccaaaaggcggcctgcgctgtgcgcctgccgccttttggaaacgtgccggaatacctttggctgatttgtatcctgtccatattgaccgtctatgaattaccgcttaccaccaattcacaaacgccgttgtgaaatggaagtatggttccaaatgaattaccttttataatccgttcaaagtctcccctgctctggtgatggggaaacatgtacttttcggctttcccctcatttagaagtctctgcacagcgccgccctctcttacccgtccggtaaccagaacaacgtccccctcagaaaccatggcctgcacgtctgcttcatttttttcgtttttcagatgtgtatctgcaatcagcaggatatcaaatccactctccgcctctttccggcagatttgctgctgcgttatatccctgagcatatcgagggattcttttttataccaccaaatatctccgagcgtttcatttgcacacttcataaaagtttcatccacgcgtattacggcataaggcaattcactctttaataaatacagaagttctaaccccctcccatacagcgggacaggcaatatcactcttctccctgtctcaagcttttcacggactctcctgagtaatgcctggcgcagtttttttgccccaagtccggtgctttcatgggcgcagtcaatgattgccagctgcgcctccctgtttctgaccgggtcgcagagataaaaaacggtatcctcctgataatctccgctgaaaaaacaagctcccagctcatcttttatcagaaaccacagtccgcccggacaatgcccgctccttccatagttaacccggaccgtcttatatccggtatctgcaaggctcttcccttcaccttcccggttatcctccgtctcgtccagtatgagtatcttattataagcgattcccgacaagcgcagcgttacctgcgatgtcacaagccatccgcggaatccctgttccgcaaaatagccgaatgctcccgcatgatctttatgacagtgcgtgagaaaaagaaaatctgcctgagccagttcctcggggtgacagcaggccacggaaccggatcggtatccatgattccgcagtccacgatataacagcgcccttccgtcccatattctaccataaaacagctccggccgtgttctccgtaaccgccctttatactaattcttctcatagatatacagcctctctttggctatgcaggcatatcccgtcttgccctcttccagaaagtcctgatggagcaggcagaagccctctccctccgcagtcattaccttaatacggtaaacgcctccctcaaaggtggacatcaccacagtgaccgggattgtattctctccctccgtctcctgccatccgcattcttccggcctaaaccgcagttcggcccggaacggaacctgtgttccgacctccgttcctgctttgccggtgggtttaaaatacagccccgtcaatttttttcctcccagggatacctgacagaactcatctgagccggaagtgattagggctttcatcaggcagttacctgctcccagaagtcctgcaaccatgcttgtccccggctgcagataacaggcaaacggcgtatccatctgatcaatcatgccgttattcattacaataatccgatccgccatggcaaatgcctcggacgggtcatgagttacatgaaataccgtcgtcttcagggagtggaacaactgtgccatctctgtgcgcatctcaatccgcagttgaatatccagattacacagcggttcatccagaagaacaatcgccggtttcgtaattagcgccctggcaattgccactctctgctgctgcccgccggacagctccgacgggtactgctccagcagtccctccagatgaagcagggataccacctcattaagacggctctccatttcctcttttcccagttttttcaccttcagcccgtacagaatattttcccttgctttcatatgaggccagagggcaaaatcctgaaaaaccatattaatgctgcggtcctgtatggcaaccattttgccagccgccgatacctgctgcccgtgaatggcaacagttcctccatccaggggcagaattcccgctataatattcagcagcgtcgatttcccgcacccggaaggccccaatacgctgataatttcgccctcctcaacggaaaaattgattcccctgaggatttcttttctgccaaagaactttcttacatcgtttatctccaatattttatccatttctgttcctcgttttttctgatattgcccggcatgaaatttccatgcagcgtacctttgccggggtcagggacgtgtctgcgaatcacctgcgaagcggtcgccacggcctgtttctgcggcgcagttccggcgcggactgcgggcggcacaggccggacggttggtacctgacctcgaaagattcatcaagtattccaaaatcagcataatccctataataaatgcagcgcccacaatggttgcggcagccgcgtacccgaacttcaaatcattgtatgaatcgctgatgtaaacaggcagagtgctgtagttcggcggatataaaatcgtagtaatggccaggttgaatacgcttccgccaaatgcggccaaaacggccgacactacgctgccgtgcagaagcggaagcaaaaccgtgcgcattcttcttccaaatccggctccctgcacctgggccgcgatcagcaggcttttcggcaccttcgccatccctccgaccagaacacggttaatcagcggaatggctgccgccacgctggccaaaacgagaatagacggttttccatacagatgcaggcccaaaggcgtcagccatttctggttccagacaaatatgtaaccaatacccagcacgactcccggaaccgccattgctatcagtgtcatcatatcgataaccttttttaatttaaacagagaataagtcagcacataggcaacacaaaaaccgattataataccgatggcagccgctaccccggccaggcttaaagagtgctttacgccggccagaagctgactgcccgtttgaaatacttttgcataattatccagagtaaaccggaaccgctggatacttaccgagcttgaaaacgacataatcagattggagccaaccggaatccccagagccgccagacagaagcagaaggtcactgccgagagcgccgccgatttgatacgtccgatacgctggggcgttacctgctccgtcccgttgtccagaaagtcaaattttcgtttccccatagcggcgtactggataatcattgcaatcatgatcataatcatcagatagaacgaaaggaccccggccatatcaaaacggaccggagaagaacagatagcgctgtaaatcgtataaggcagggtcggaaacgaatacacagccgtaatcgttgacgacattccatagtcgcctaccgtatccataaaaatcagcatggccgccgaacagtatgccggaatacagagcggcagctggacagtaagccacgcccgaaagggactggccccattcatcctggccgcgtgtaccagcctggacggataccattccatggcagttttaatcgtgacataggcaagggatatttgcataacaccatgacgcagaccagccccaatagctgaacacaaagccgccgactccttcaatccccagccaggcactcgcaatcccgttgccggaagcaaaataaacccagccctgggccagaataaaggagggcactatcatgagaatccagcttacaatatccagaaaccgcgccccgaaaaagctgtatctgactctgacatgtgcaagaaacgccgccagaagcaggccaatcaccgttgttccgatactcaggaaaaaggaattgaaaaatgcctttttccacagagggcggacaaacacatccagaaccagctttaaattagacggatcaaatttttctatctgcagacccgggcatacaacctgaaatagtaccgccgccaacggcagcagtactaatagaatcaggattgcaaggatgccaaagcccgctgcattatccttacttttcatttttcccccgctcttactgtgccgacatgtctgcaaaccaggccttgatgtcagcctcattttctgcgccgaattcaatatcagccacagccatcctggcgtttgcgtcacgttccggcttcagagctacgccctctacagacggctcaaagtagccttcgtcccccatgtcaacgagtttctgctgtgtatcggcatccagcaggaaatttacaaatgctttagcaatctcctcctgttccgtaacggcgctgatggccgccacacgggtggaaccaggcgctccttcttccggccagataatcgaaatcggttcgccgctttccttcatatcataggcattcgtttcctggagcagagccacggaaatctcaccgcttgcaagggcctgcacgacctgcggatttttagggaatacctttagtccctgggaaaacatcgtctggaagtattcttttcctccctcaagtcccaggctgtccataaaataagctgccagagggtaggccggggccgcaacgccgggatccgccatgccgacttttccgctgtacttttcatctgtcagatccgcaaaggtttttggagcgtctgcttctgtaaatacatcggtgcggtatacaagcacgcctgccgcatggataccggtcggataaaagcatttattatccggaaccaggttccttgaaaactccgtcagattggcggcattctccggttcccagtctgtcagaagctgtccctcaccggccaggttatatacgtcatacatggagtcaatccaaaccacatcccactggggattcccggcttccgcggcaatccgcgacattgtctcggcgccgttgcctgataccacttccacatcatagccggtggcctccttgaacatttccggaattacagcgtcaaaatcattcagatacaccaccagaggctttgtctgagttacactgccctcctgggaaccgtcatttgcaccggttaacgcctcctccgtattttctgccgtatcggcaaccgtttcggcggccgctgtcggagcggaatccgccgaagtgctgccggaccggcaggctgttaaggatgctgccgctgcgacacaggtaaacagagccgctgtttttctaagtatgttctttctcatttgtgttttctccattcctcagttattcaattcgttaattctgatttcttaattttataatattcgtgtaaaacgtaatatcatagactggtaaaacatttgtaaagcttttttcttcttttgtgtcaaaccatgacaattcacccgcatctgtggtaaactgtttgtatatcggcagaaacggaggcacggccatgtcaaaaaaggcatattcagagcaggaacggaaacaggtagggcaggatttattgtccgtagggctggaaatgctgtcccagagggggctgaaagggacaaagctccaggacattcttcaggcagtgggaatttcaaagccgttcttttatgggaactattacgcttctctggcagagctggttcttcacatcatcgattatgaaatttccctgctgcttgagacggtacgggatgatattgccaaacgggacgctcccgtggagaatcggatcaaccattttctgaaaatgatgattgacagccgccagcaccacttttttgtcatgacccaggaagaggaggtgcttgtcagcaaacatctgacccctgaggagcttgaggcgttccaaaaaggacaggcggctttttacggagagcttctctccctctggcacataccggaagaaaaatgtacgcccaaagaattaggcaatctaatcctctcggtggttctgatctacaactcggcggcccgatcgctcccatttttcttcccggaggaattagaacggacggcccgggcccaggccaccgccctttccagatatctggcctcgctggcggacagcagtgactagcggcagcgcatcgtatgaaccgatgcgctgttttctttatggacaggcttgcttttcttaaagaattccagtataatccatttaaatactttcatttatgcaatcgtaattaaatgacgcttacggtcacggttccagaggcgtcagacattcggccaatctgaagtatttctgcgctttaatcaaaagttgcaaagtaactgtaaagtattagcataggaggaattaaatcatgggattattcggaaatctgttcaaggggccccaggtggacatggcaaaaagtgatgccaaccgtaagaaaatgcgcgccttgttcaatcaagcggtagaaaacggagaggactacaaaatactttttggcttcacggaagatgtgagccgttttaattacggcattgtccacggcagcaaaacgaaaatcggcaatctgatcgtaggctggaatgaaagcagccaaactatcgttgtcgttcctactgttcccgatttgtccggctgcggtgatgccgcattctaccagcggagcgaaatactgaaagcatatcagaataagttccccaccaacgcttttatcatttacccggacagaaaaagctatatcggtatcgaagtctgtgactggctggaggacgaaaagctgtatgtttatgtttcccaggatgaggaggtaaaggcgtttaccgagttcttcctgaagcagttccagaagaaataagtttcggcggcatgattccctgccgccgcaggcattggctcacttagcgaatgtaacatgcttagtgaacaagccctctttagagttgcgatcctctgcggagcggttttcatttaacaggagaactttcctgttaaatgaaaaagagcagcaaccgaagtccctgctctgtccgtactgcctattttatttcagaaacgcctccgccacaaacatgtcctccggcgttgtcaccttaatattccggtaagatccttttgtcagcctcacctttacgtttgtcatcgactccaccaccatggcgtcgtcggtaacgccttcctggtattcctcacagctcatcatcttatcataggcttccatgagcaggggataggaaaatccctggggggtctgaatcatccagaccttgttccgatccggcgtcatttttgcaaatccgtcgtcatcggacagcttcaccgtatccttggacggcattccggccgcacaggctccgtaaagaacggcatcttccatcacacggccgattatttccccatctgcaaacggcctggctccatcatggatcatgacataatccccctgaccgtagccgccccggcttcccaggtatttgagtccctcataaacagagtgatagcgctctttaccgccggagaccacagccataaccttaccgattccataccgctccacgatctctttccggcaaaattccctctcgtcctctcctgtaacaagaataatatcgctgaccgcgctttgttcaaattgcttcagcgaataatagacaagcggtctgccgtccaaaagcatatactgcttccggatgccgctgttcatccgctttcctttccctgccgccagcactatggccgccgttcttttgccttctctatccgccatcaccgttctcccaatttcaggttcggcaccgcattgagatcccatcctgccctggaaccgcctatatattcatagtaggccgccacgccaatcattgcggcattatccgtacagtaaaccggtgacggataatagaacttaagccctgccttttggcatgcctccttcatcccctcacggagagccgtattggatgcaactcctcctgcgattgccaccttgtcgtaaccatattcttttgccgccaaaaccgtccttgtaaccagcacctccaccacggcattctgaaaggatgcggccaaatcaggaaccacaatctcttctcctgtcatctttgcatggttaatgtaattgagaaccgctgatttcaggccgctgaagctgaagtcataaggattgtccccgacttttgcccttggaaattctattgcatgtttattcccgccctgcgcggccttatcaaccttggggcctcccggatatcccagtccgacagccctcgccaccttgtcaaacgcctcgccggcggcatcgtccctcgtccttccgattatctcaaactccccgtaatccttcacgatcaccaggtgggtatgtcccccgatacaatcaggcacacaaaaggaggctctaaatcttcattttctataaaattggccgatacgtggccctctatatggtgtacgcccaccagcggttttccggccgcatacgccagcgcttttgcctcggccactcccactaaaagagctcctacaagccccggtccataggtgacggcaattgccgtaatctcttccagggtcatatccgcctcttttaacgcactctcaatgacctggtttatcttctcaatatgctttctggacgcaatctccggtactacccctccataaagtgtatgaagggcaatctgtgacgatataacattcgaaagcacctgccggccgttcttaactacggcagccgcagtctcatcgcaggagctttcaatcgccagaatataaacgtccccgtctgctgtatgtttcttcatgacgtcctcccgattcctaatcttcctcaaatcccagttccgccgtccagccgtcctttgctgccttcgcctcagggaatatctctctgaccttgtccatatattcttccggtctgttaagggacgggctgtagtgagtcagccacatctgtgccggcttggccgtcctggccaggctggccgcctcatacatggtcatgtgcttatattctctggctttggactcctttccgtcctcgccgtacatcccctcacagataaaaagatccgcctcttttgcatattcggcaatgaccggaaccggccttgtgtcggtacagtaggtgacacggattcccttcctcgcagggcccagaaccatatccggagtcagcgtcctctctccgtcctgcaccgtctcccccttctggagtctgttccagtatttctgggggatctgctgctgcctggcccgctccacgtcaaatctgccttttctcggaatggaaatcgaatatccataacacgttacgttgtggttcaccttataggcatctattacgtaaggtccgatctgaaactgctctctcggctccgacagttctataaaacggaggggaaaaggcagctccggcgcaatcgtccgaagcgctcccaccactctttcaaggcccttcggcccaatcataatcaccggctccgttctctcagcattgcccatggtcagcagaagtcccggcaggccgctgatatgatccgcatggtaatgggtaaaacatatcacatccacaggcttcggactccatcccttttccttcagcgctacctgcgtaccttctccgcagtctattaataaattgcttccgtcgcagcgggtcatcagcgatgtcagccacctgtatggcagcggcatcattccccctgttccaagcagacaaacgtctaacatgtatattcctcttttctgtctctttctgaaaatagttcctccaaatcataccataaaaggaagcatagttgcaagtatttaacagaggttggggggacacgtccggagcggaccatgtccggtgtggcgggagtggtgtggctgagtcttcagtccccgggttttagactgtcgtgagggggaatccggccggaatgaattcctgcggggaccgtttgcactctttggagtgcgcatcagtgctaagctcgtaaggaacctcgctaagcaccggcggactcccagggccaattcacaaaattgagcggaagtaaatccggtactgttcttccggccttccttccgctcaatcgattaggaactattatgaaaatcaaacgcatccttctccaacccacgacaatcttcccaccgggacgaaagactcatatacacatctaaccatcccgtccggcagcgtcctcaccgcctaatttataataattctatctgttcttccacatccaccggaatacagaattctgccgtcattctgtcataacattcttcacacaggtcaaaatgatgcacttctccgtccttctctgaaaagtaatcccagacgtaatcaaaacgggcagccccttccctcaggattccttcttttacaaccatcttttttccgcacatgttacagcagactgcgtccaactgtccattttctttgtacttcctcataatatcctcgcctttcttcttatcctgcgttaccattttcaggttgtccatcccgggcaacagtttagacagcatgaactgttaccatcccggacctttttgtttttcctcatactttcccgtccgctctcctgtctttaccggctcgccttacagcgaaaaaaggagcatcaccgacagggatactcctacattatatctggtttattcacgattttaagtggtaattatttcaactccccggcgccacataatcagcgcatcctccaccggatttgaataatacctttttctgactgcttcaatcttaaaaccgtatgatttataaaggcttatggccgcggcattggaagctcttacctccaggcttatctcatccacccggtttgccctggcatactccgccagaatttccatcagatccctgccgtaccccctcccccttgccgcaggaagaacggcaatccgcatcagttcaccctctccggctatcacgcggaagttgcagtagcctgcgattttaccgccttcttccagtacccagaccttgtctaaagggctgtccagacaatctgaaagaagcgtcatagaccatggtacggtaaagcattcctgttccagttctgccacagtgtgcagatccttcgtctccatcaaacggatcgctgccatcttactccttttcccggcacggttcacagaccggctaatctaagcggcgccatgaacggtccccatcttccagttataatattgatattcaagctgccttatctctccacaactacgattccggccgccagcttatccatctctccctgacgttccgccacctcgcgttcacgctccgcctgggatttcctcaagtagtcgggtttatgctccgcagccgtctgaagcctgccctgttcatagtacacagcccccagagccgcaacggaggcccctctctgccggttcacatgagccggggcaaattcaaagggcacgttcattgtctcttctattatatgacggcagacaggcactccgtcaccgagaaaaataactttttctcccatccggttaagctcctgcgtcaaatccctgatatccgacggccactgctccctcaccacttcgaaagaatccaaaaaacggtagagtcccgtatatacctggctgcgccttgcatccataatcgggcagatcaaagcgtttgcgccgtaaaggttgtaggccatggcatccatggttggaacgtggatcagcggtttattcagggccagccccagcccttttcccgtcgccgaaccgatgcgaagtccggtaaaggagcctggacctccggaaacggcaatggcatccacggtgtcaagttccatctccagcaaccccatcatctgatcaatcatcggcagaagtgtctgggaatgcgtcttcttaaggttgaccgtatattccgccgtaaccacatcatccgttacaatcgccacagaggccaccagggatgaactttctattccaagaattctcattttctttcctccacagttattttacggtagtcaaatcccttttccagatccttttcaatccgtatctgcgtaagctgatccggcagaatctccccgatcaggctggaccattcaatcagactgacgccgtcgccgtaaaaacagtcttcataaccgatttcatccatctcgctgatgtctccaatcctgtagacatcaaaatgatagagcggaagccgcccttcatcgtattgctggataatcgtaaaggtagggctgctgaccggcccttcaatccccagtcctttggcaaagccctgggtaaatacggttttccccgtgcccaaatcaccgtccaggcagtaaacctcacccggccgggccttctgcccgagctgttcccccagttcaaatgtctcctccggtgtaaatgtctctattgtcatctcagattcccttcctcaattctgccggaacatactccctgagcagattcaggaactgttccttttttccgccttccagcacccgctgcggaaacaggtaggccctgtctttcgtcagatacagcacatagatgtccgacacctttcccacttttataatctgtttccagcggatcacggctttatccctgccctggtgaactctgagcccgttataatctattttaaaatgagtttcctttgatctctgagggtccagcgcttcccgccccgccttcctgtacaggacaaacggctgggtgcaggcaatcagcactactgccagcgccagtatggctttcataaaaccgggctgggccggccacgtcgccaccacggctccgagggcaagtatcgtgcagccgatacttatgaatcccggtactgaatggtaatagtggtgcagcgaaaacaggaaaatctccctagacgtaaccttaactcgtaaatccatcttccactcctcttttctatcagctttccttcccacatcttaatataggattagcaaaaagtcaatccgccgttactgttcacaggtgaggaggacgcgtccggaacggaccatgtccggtggggtgaggttttggctgagtcttttgtcccggcgaaaacctggccttggggcggcatccgcagactttatcttcgcccgcagccccaaaccacggcaatcttccccgtgacgaaagactcatatacacaccacacccccttgccagcgatttgcgtttcctgtatacttgtggtaacagttcaggcaggtctgcgcattcactgcgctgaccgtgcaaaagggtagtggcagcatgcatccggctcatcgcatagcgatttaattaaccggatgccgtaacaattcatgctgtctgtactgctactacctgtgaacataaaggatggtaaaatgcgatgaagaaaatacttttattcacaaccggaggcacgatagcctcaaaagaaggtaacaacggcctcgaaccggaaatggatgcaaacgagcttctctcctatatgggagatctggccaaccgatatgatattacctgccgcgagctgctaagtctggacagctccaatatccaggcggaagaatggagaaaaatcgcgcggaatatttttgaaaatctggaacagtatgacggcatcgtcgtaacccacggtacggataccatggcatatacagcttccatgctctctttcatgctccagaacctgaaggttcccgtcgtgctgaccggttcgcagatgccgattgataatatgctgacggatgccagaaataacctctacgccgcctttgccgccattgatgccgggattgccggggtcagcgtcgccttcaaccggcgcattatgctgggatgccgtgcggtcaaggtgagaacgcttggctttgaggcttttgaaagtgtaaatgccccttatcttgccgaagtatttgccaacggaatgcgcagataccatgaaccggaaaaaccagtccccggctcccgtcccggaaccggtgcttcctcctcagaaggacatcatccggctgtcctgaaagacagtatctcaacggatgtctttctgctgaaactgatccccaacacaaaacctgccatttttgatgctctgcaaaaactgggttacaaagggatcgtactcgaggccttcggagccggcggactccattttttcagaagaaatctgcttgagaagctggaacagctcacaaaggccggcatcagcgttgtagcctgcagccagtgcctgtatgagcccagcgacttttctatctatgaagtgggacgccgcctgctggagtgcggagtaatcccgggccgcgatatgacgacggaggcggcagtgaccaaactgatgtgggcgctcggccagacacaggatccaagcgaagtgcggaaaattttcgatacggatattgcaggagaggtttctataaacggagactgacataccaaaccgccatatgaccggaacaatagccctgaactgcaactattttaatgtaaatatatacaggagagaaaatcatgaatgagacagaaaaacgaattatacagttgattgatgaacaccgtgaagaactgatcgccatgggaaatgaattgtacacacgggcggaacgcggctttgccgaagtgaacacctccgccttcattgcagataaacttaaaaagcttgggcttaacgttcagaccggactggccgggacgggactgcgcgcctccgccggaaaagagggcggtgtcaatgtggctctgataagcgaactggacggtatactctgcccctcgcatcctcaggccgcaccggacggtatgagccatgcctgcggccaccatgcccagatgaccgctatgctgggcgccgcgattgccctgacttgcccggaggttgccgcagagctggacggacaggctacatttttcgctgtcccctcggaagaatttctcagcgaagatatccgctgcggactcagggagaaaaatatctccacccactcaggcggaaaggcggagctgatttaccgcggctgtttcaaggatattgatatggccatcacgacgcacgcccacatgctgccgtttgatgactatgatttcgtgctcggcaacagcgcctgcaccggctttatcggaaaaaccgctgttttccacggcaaagcggcccacgccgccggagcccctcatgagggcgttaatgcgatgaatgccgctgcactggccttaagcgccctgggtatgatacgcgagacattccaggaaaaagattatatccgcgtccatcccatcatgaaagaggccggttccgccgtcaatgtcgttcccgacaaggcggttctcgacatgatggtgcgggccggtaacttaaaagccgttgccgaagtgtctgaaaagacggatcgcgctttccggggcgctgcctacgccataggcgccgaggtcgaaatcacggatgtccccggttatctgcctgtcatcgaacgactccccgacaaggtgatgacagaagctgccggactgcttggtgattctgttaaatggacctccatcacccccggactcgaaaacatgacgtccactgatgtcggcgatctgacccatctgatgccggtgctcaatttcacattcggaggctttgaaggcgccctccacagcaaggatttccgcctgaccgacgccgagaaagctttcgtgctgccggcaaagctgatggctctcattgcctatcgtcttctgaccaatcaggcggaagaagccagggaaattcttgagaatttcaccccggctctgaccctggaaaaatatctggaatatatcggttaaaatttcaaggcggcaggacgctgccgcctcatattcagaaaaagacctactgcccgctacccgagtagtccggggagccaggttatcagtaccggcacataggcaaatatcataactgccgccatctcaatcagcaggaagggccatacgccctttacaatatcattaaacttcagtcctgtcaccgaacatgccgtaaacagattatacccaaacggcggcgtgacataaccaatcacaaggttgataacaaaaatcatacccaggtgcaggggatcaagcccagcgtaattcccagcggcacaattaccggagcaataataataatcgccgccactgtgtccatcagcgctcctactatgaaaagcagaagcatcaaaaccagaagataaatatacttatttgtgataaataccgacagggcgcctactatctgattggaaatctgtgtgacagacataatccaggacagcaggtttgcggctgcaataataaaatccaccattgccgccgtctccatggacttgacaagagcttttggaagatctgatatcttaatttctctgtatacaaaaatccccacgaaaagcgcatacacgactccgactgccgccgcctcggtaggcgtaaagacgccgctgtagattcccccagaataataatgggaagcagaagcgctccgagagcagaccacgtattcttcaaaaattcccgaaaagaaaatttttctcccttatacttgagtatttccggattacgcactgcaattaccgcattgactccaatcagaagcagcatcagcgttacccccggcacaattccggccacaaacatttttgggatggatacgctcatggttaccccgtaaataatcatcggaatactgggcggaataatcggccccagtgcgccccggccgcagccataccggccgccgttttaatcggatatccatttttcacaagggacggaatcataatactgccgatagccgccaccgtggcagggcctgagcccgtaagcgcggcaaatatggcgcacgacacaatcgtcacgattcccaggccgcccggaagccagccaagcaggctctccgcccatttaatcatccgtttggatattcctccgcgatccatcaaatccccgacaaacacaaacaggggaacagccagcagaggaaatgaatccagccccgttacggctctctgacagaccagagtcagcggcttcatgccggtttccagaagaaaaaatatcccggagccaaggatggagaatgcaacgggcacgccggcaaaaatcataagtatcataattaaaaacattatgcctatcataaccgttctcccttccccgccagttctgccagtgattctgccagatgtaccgcggaataaaatataacaagaacgccgcagaccggagcggacgcgtaaacatacgacatgctgatccggagcgccggactgagctgcatcctcgtggacattacgaccttccagccatatcttactaaaacatatgcgactaaaataataataaggttgaccgctatttttaacactgtctgcacctttttcggaagggcgtccgtaatcgccgttaccgtcgcatgggaactcttttgcgtacagatagccgcccccagcaggttagaccagataaatgcatagcgcgccagttcctctgtccatgacagggaattattcaaaacaaaacgggtaaatacctgaaggacacaggctgctattaaaatggtaaatgaaaccgccaccattatattcaatactttttcgacagcggcgttcatcttttgaattcctttcactgtcatccctcctatcctgtgtttccccgcgtccggtacggccgcggggaaacagactgtctgcttgcttcttctattttactctcccagcgctgccatcagatcatcaacatagctgccgccgatcgcttctttcctggactcatagaagtctccgagtacctctcggaatgccgccaaatccacgtcgcggacaaccgtcattccctgctcttccatttcgctcagcatctgctcttcaacacgggcattattctcacggcaggcctttcccgcctccacggcagcctccgacaaaatctgctgttcctccggactcagagcgtcgaacacctcacccgacacacaaatcaaaagaggggaatagaagtggcctgtcatattcagatatttggctatatccggaaaaccgttgctgtatgttacgctgacaggaatatcaagaccgtctattgttccctgctggagtccggtaattgtctcggaccatgccatgggaaccgcgttcacgcctaaagccgcataggtagccaggtacgtctccgtctccatacagcgtattttcaaacctttcatatctgccggttctcttaccgccttattcagagtcaccagatggcggaatccgccttctccccatccaagcgcttttacaccgtaattgtcatactcttttaaaatgctctgcccgatttcaccgtccaatatattcgcggcagtctcattatctttaaatataaacggcaggtcaaagagaccggatgccggtacgtatccgctggcgtaggcattcgtcattaccgccatatccgttgtgcccatctgcattccggagaacatttctccttcctgtcccaattgtccgcctcccatcacgtcgatccggatcccgcctccggtgcgctccgccacgatgtcagaaaaatttttagcaaacacatagtatggatcatcctccaccgcagccgtcgtaaatcctatttggtacacctttgatgcattggccgcattttcctgctgcccgcctaagctgtcccggctctctccggcctccgcggctttttccgttccttctcctgatgacgcgttcttattcccgcatgccgcaaggctgaccgccgctgcacacaacaggatgcctgacacccatttcttcataaaccgttcctccttcatgctgtttttgtttccactgttaatatctgttttgtttcgctccctgtccgtcttttttctattccttccaacaggctcttaggaatatcacagaccatggttcttatctctctttctgtaaatccatttcccagcagcgcctcaatgaagcggatcatcccctccgccggcggttccctgaatgcctggccgcgatcggtggcaataaagttattctctgtcccgactgctctgatatgctgcgccatctgctctgccgtgcagtcgccgtcttcgatgttagcccagttccgctcaattacaacaccgattccggccagttccttctggatctccgtcggaaccacggtccgtttccattcgggatgggtgagtactgcccgcactcccgcctccctggcggctcggcatgccgcaacagattccaaaacactgatatgtccggtcgccagcacagcatcatacttttttatcacttcaaggacctcataaaacccggaaaccagttttcccgattcgtcaaaaagcccaattccgggacgtgaaaaaaaatcgcccggcatatcgccatattgcaggcagtgagccgcatctctggtgggaagccagataaaacccgctcccagtttcagcgcactttcgactgcgtatggattaatgcctccggccggccagttgagtacaagccctccataggcccgtaccggcagcccgcttcgcttattcataagagcggccctggctgctgtggattcataatggtttttaatcattacgcctgccattccggctcctgccgcctgttccagcagctcaaaatcatccacagagcggctgacatgggaggggaaactgtgggcatgcagatcatagccgcccctcaagagttctttggcctccccatatttatctgtcatttatccctccaaatatgaaattgtttattttttcactccctgcaggttgttatatccatattttagcataatttttcaaaaaataaaaacaagtagtttatatccatccacaagtaaatgcttgtcaatacggcattcttccccggcattttcctttccccaaaccgtgtaaagacagcatggactgttgccagaccgcagcagttcgtaacaggtcagacaggtctgcgcatttactgcgctgaccgtgcaaaaaggtagcggcagtaagcattcggctcatcgcgaagcggttttaatcagccggatggcctaacagttcagatgcctgaactgttacggcagttccgttggaatatcgttaaaaatggataatctgccgacttctggcaaagactaaggtatgatacaccggccggacagaacacagataccgccacaatgttttacggaatgcctacaagtgattacttgttattaatcgttgtgcctgctatgttaaaatagacaaagaaggaggcggaggattttgaaacagagctttaatatttttttactggtagcagaagaaatgaatatcggacgagctgccagacgggctttcgtaacgcagcaatgcgtaagtgaccatatacgacgcctggaacaggaatacgaggttgccttgtttgaaagaaaacctagtctccatttgacaaaagcaggagaaaccatgctgaaaacactgcgcagtatccacatcctggaatccagcatggaaaagaacttaaaagaaatttcatccggacaaagaggctcctttaccgtcggcatgagtacctcccgcgcacaggtaatcctgcctctcgtcctgaaggactattacgagcattttcctgaagtggaggtttccttctatgtcaatgatacgattgttctggaacagcgccttttagacggatccatcgatttgtttttaggcgtcaacacgtctcagaacccggcattttccgtgcttccacttgtaaacgacgaaatgtacctaagtatcagcgaaggcctcttccagaggcattttggagggaagtatttatcagtttttgaagaaggggtggatctttccgaattttcagaggtgcctttctctctttactatgaaacaggggcgctcaacatcgtaatccggcagcatcttttagattacgggatttctctcaacaagataccctatcacatcagcgactgtgatacccacattctgctctgtgcttccggactctgcgctacactgatacccaaaatgctctccctcagggtccatgagcataatgcgaaatgcgaaccggacaaatttattcacatcttccccgtcaaaaacttcaattatccactgcgggttgatctgatatggcataaaaatgtggagcagccgttttatatacgggctttctgtgagttaatccgcgatgtggcccggcagctcgtataaaaggcgtggaaggttcttgtcaaacctttccacgcctttttattctataggaaagccctccggacaggatcgcattttcagcggggccgtgactatagcttcatcgtcagggatatcctctttttcgccaaatccacgcccagtactttgacctccacgatatcaccgacactgaccgcctccagaggatgtttgatatagcggtccgtcatctgggaaatatgcaccagtccgtcctgatgcacgccgatgtccacgaatgcgccaaaatcaataacgtttctgaccgttcccttcagcaccataccaggagccaggtccttcatatccatgacgtccgtcctgagaattggcttcggcatctcgtcacgcgggtccctggccggcttttccagctcactcacgatatcgcgcagggtaatctctccgatttccagctcctgtgaaagctttttataatccgtaacttttttactgatgcccttcaggcctccggaggtcagctccttcacctcgtacccgagacgtttcagcagcgcttcagccgctttatagctttccggatggacgctggtcgtatcaagcggattctttccgccctggattctcataaacccggcacactgttcgaatgccttcggtcccagcttggccaccttgagaagttccctcctgctttcaaacactccgttctcttccctgtaagacacaatatttttggcaattgtcttgtttatgccggaaatatattctaaaagggaggccgacgccgtattcaagtcaactcccaccttatttacgcagtcttccaccacaccctgcagggcctcactcagattcttctggttcatatcatgctggtactggccaactccgatagatttgggatcgattttaaccagctccgccagcgggtcctggagcctccttgcgattgaaaccgcgctcctttgtcccacgtcaaaattcgggaattcctccgtagccagcttgcttgccgaatagacagacgctcccgcctcattgacaatgatgtactgcacctgctcttttatctcctttaaaagcccgacgataatctgctccgactccctggacgccgttccgttgcccactgaaatcagtgaaacgccatatttcgtaatcaggttcttcaggattttcttcgattcttccaccttattctggggtgcggttgggtaaatcaccaccgtatcaagcactttgccggtaccgtccaccacggccagcttacagcccgtacggaatgccggatcccatcccagtacgacgcggcctgtaataggcggctgcatcagaagctgctccagattttttccgaataccttaatagctcccgcctccgcattctccgtcagttcgctgcgtatctcgcgctcaatggcaggggaaatcaggcgcttatagctgtcctccgtcacttccctcagtacgcgggccgtctccggattctcgctggtgattaccttcttctccagatagcgcagaatcttctcttccggagcagtgattttcacagtaaggatcttctccttctccccccggttaagtgcgagaatacggtgccccgccgccttctttaccggctccgtaaagttataatacatctcgtagacagattccgcgttcccgtcacgggcagatgaatcgagagagccttcctggaatgtggccttgcggatatatgtcctgtactcagccgtctccgctatacgctcggccagaatatccttggctccgttcagggcctcctccgcagtcagaacgcccttctcctctgagatataatgctccgcctctttcagaagcggcgtctttgtaagctgcataagaaccagattggcaagaggctccagccccttctccttcgcaatgctggcccgtgtcttccgcttcggtctgtatggaagataaaggtcctccactgccaccagcgtcgacgccgccagaatctttttctccagctccggagtcagtttttcctgttcacgtatggaattgataacctgttccttccgctcctccaggtttcttaaatattttaatctctcatccagatttcgcagcacctcatcgttcaaagagcctgtcgcttctttgcggtaacgggcgataaacgggatggtattgccttcgtcaatcagtttgaccgcagcctcagcctggcttcggttaatctggagttcgtcttttaaaatttgaataatatccattttatttcctcactttgtgtcattgcatctgatgacggtatgaagtccgccgtgaacggccgccataaatttcctgtgccagattattatacaggattcttcctccggctgcaagttcagatataggatggcggacgggaactgctttcatctaatgcagcgttaccacaggaaaatttatagttgacaaatttccgaatactgtctatattaaaaaacatggtgatcatatgactgacggaacaagtggaagaccacgtggagtatgatcgataaccggccgaccgtctgggcagaaaaaagcccggactgccggcttttttcgatcatttttcatcaaaaggaggttattcatttgatatccggacgtatccattccattgaaagcatggggctggtggacggccccggcatccgttccgtgatttttctgcagggctgccgtctccgctgccggtactgccacaatcctgatacctgggatccaaacggaggctctctctgtacggcggaggttctgatgcagaagctgaaacggtttaaaccctactacggctctaaaggaggcgtaaccttttccggaggcgaacctctgctccagagcggcttccttctggaactgcttaagctctgccggagcgagggaatctccgcctgcctcgacaccgccggctgcggagcaggaaactatgaggaaattcttaagtacaccgatctggtgattttcgatgtgaaacattttactgccaaaggctatgagcgggttacgggacagtccccggacgaagcggccgttttccttgacgccgtacagaaatcagggactcccatgtggatacgccacgtggcggttcccgggctgacggacggagacagccattttgaagggctgaggcagtttttaaaaacactgcgcggagtagaaagagtggaattgcttccctaccatgttttgggcgtaccaaagtaccgcgaactcggcatcccatatccgctggaagatgtcccgcccatgaaaccggaaatcacggcacagtggcagcagctcatgaaccgcggctgctgcccggcccgtcagaataataaatggaggattcattatgcctgtcaatagcaacaacaaagcctgggaaggattccgcaccggggaatggcgccatcttgtaaatgtacgcaattttatccagaaaaactacacgccctataccggtgacgccggttttcttgccccgcatccgagcgcacgaaaaaggtctgggaaaaagcccatgccctgattattgaagaggtggagaaaggcatcatcggcgtggagacacggaccgtctccggtatcgataattttgcccccggttatattgataaagaaaatgaagtaatagtcggcctgcagaccgacgcccctctgaaacgcatcgtcaatctgtacggaggcatccgtaccgcagagcaggcgctggaacagtatggctgccgcctggatcccataattgaaagacatttccgtctctaccgcaagacgcataacgacggcgtatttgacgcctatcccgagcgcacgcgcctggcccgttcggcaggcctgctcaccggtctgccggatgcctacgggcgcggacgcatcataggggactaccgccgggttccgctttacggcactgattttctgatcgaagaaaagaaaaaagacctggacatgatggacggagccatgacggatgaacggatccgtctgagggaagaagtgagcatgcaaatccgcgcattaaaggaaatggcccggatggcagaaaaatatggctgtgatatcacgcgccccgccgaaacagcccgtgaagccgtacaaaacctttatctggcctacctcgccggaatcaaggaaaacaacggcgccgccacgagcctgggccgcaccgctacgtttctcgatatttatatccagcgcgatctggatctgggaattttagatgaaatgggtgcgcaggagctgattgatcagtttatcatcaagctgcgccttgtacgccatctgcgtacccctgaatacaatgagctgttcggaggcgatcccacctgggtcacagaagccataggaggaatgggcgtggacggacgtaccctcgtcacccgcagttctttccggtatctgcacactctgactaacctcggaacggctcccgaacctaatctgaccgtgctttggagccgcaatctgcctgctgcctttaagtcctactgctcccgcatgagcatcgaaaccgactcgctccaatatgagaatgatgaattaatgcagcccatgtatggagatgactactgtatcgcctgctgtgtatctgcgatggcggccggcaaacagatgcagttcttcggggccagggccaacctcgcgaaaagcctgctgtatgcgatcaacggcggagtggatgagataaaaggcctgcatgtaattccgggcattcagccggacactgacgaagtgctcgattatcccaaagtgctgggaaactataaaaaggtgctggcatatgtggccggactctatgccgataccatcaacatcattcactatatgcacgataagtatgcctatgaagccagccagatggctttgcatgacaccctggtggaacgcctggccgctttcggcgtggccggtctgtctattgcagcggactccctgtctgcaattaaatttgcccgggttaaaccggttcggaatgagaatgggattgccgttgattttaccgtggaggggaataccccaaatacggaaacgatgacgaccgggtagatgacattgcagtggagcttgtggatttcttctcttccgaactgaaaaaacacccgctgtacaggaatgccgtccacacgctctccgctctcaccatcacaagcaatgtaatgtatggcaagaagaccggctccactcccgacggccgaaaggccggggaaccatttgcccccggagcaaatcccatgcacgggcgggatttgaacggcgcgctcgcctcacttaactcagtggctaagataccgtaccgggccgtctgccaggacggcgtttccaataccttttccatcgtcccggatgccctgggcaaatcgccgctggaacgtgttgacaatcttgtatccatactggacggttatttcgcccagggcgctcatcacctgaatgtcaacgtgatgaaccgccgggtactgacggatgccatggctcatcccgaagagtatccgacactgaccatacgtgtttccggctatgccgtcaatttcagccgccttacgcgtgagcagcagctggaagtcattaaacgcaccttccatgaacacatgtgactttatcccccgctgaaaatcccgagttgcacggcgagaaactgcattattttcagtttctcgccgtgcaactccatttctgctctctggacaacctctgaaaaccatgttacaatcataaagatacaaaggaggtttttccatggactattatgacagcaatgataaccaatataaggacgggcaggggaacggtaaaaataacggcaatattcccggcggcaggcccgtgagacagccaaacggcacggcaaccgcctccctgatttgcggtatcataggcacgctctccctctgtgcctgtattgcttttccgctctctatcattttgggtgtggctgcaatcatcctctcttttctctcacggaaggggaaccgtttaccggcctggctattgcaggacttgttttaggcatcctctcactgattctcggtgtggcggaaggtctttatatgatagcaattaattttatgctccgtgatccgcagatgtcttcgatgtttgaccagatattggatcaataccagaacatgcagtaaccgcatgatttcagacggcccacggccggatgtacgcaacaagacccgggaatttttccattcccgggtcttattatatcttttaaatttcaaccgctccgcggaggaacgcactgaggcggcaggccgccgtcaataaataagcgccagtaaatccacatgccttaccagcagaaaataattctttataataaagttcattaccagtattataattccggcgcctaatgccgtcatccataccgcaggccgtaccggcttctttttccctgcgcagtaaaaacggtagagcaagaaagagggaatcgacaccgccatatacagaaccagcgggttcagacggatgctgtccgccaaccggccgtgcagcaatgctaaaagcgcccttgtgccgccgcagcccggacaatatgcccctgtcaccaaatgaaaaagacagggatatatgccctggccggcactctctatcagctctgccaaaattctcatagaaccgtctcctctttaaaagcgtgcatgtcagtctgccagagaaaatgcatcatgcaccacccgcatcgcacggcttgcatcctcctcatcaatcagcacggttatacggatctcggaggttgcaatcattttaatattgatattggcgccggacagcgcttcgaacatcttcgcggcaacgcctggattactggtcataccggctccgataattgaaattttcgctaccgtatcatcggcgctcaccgaatcggcagtcagcatctccagatgatcgtttataatcttcatggtttcctgcaaatccgtgcgggcaactgtgaaggaaatatctttcctgttgtcacggcccacggactggataatgatatccacattgatccggtatctggccaggaggttgaacagccggaaggcgattcccggttcatcctttaccccaagcacagaaattctggctgtattcttatcggccgccacgccgctcactaacattttttccatactggtcttctccttaatgattgtcccctccgctctcgtcaagctggaaagcaccaccagtttcactccataccgtttcgccatctccacggagcggttgtgcagaaccttcgctccaagagatgcaaattccagcatctcatcataggaaacttcagaaagttttctggcattcggcacgattctcggatctgccgtatatacgccgtctacatctgtataaatctcacagaaatctgcatggagggcaactgccagtgcaaccgccgtcgtgtcggagccgcctctgccgagtgtcgtcatatcatcatatttgttaattccctgaaatcctgtgattaccacaattttcctggcatccagctcattgcggatcctctccgtatcgattctcttgagctttgcctgaccataagccgatgttgtcctcatcgccacctgcgcagcattgagggataccgcctgcactcccagagattggaaggccatggccatcaacgcaaccgatacctgctctcccgttaccagcagcatgtccaattcccttttagacggcgtctcagttatctcccgggccttttcaagaaggccgtccgtcgtctttcccatggcggacagaactaccaccacgtcattacccttctcgtaatcctcaatgcagcgccttgccacattcatgatccgctccctgtcggcaacagaactgccgccaaattttttcacgaccagcatataacgcctgtcctcctgtgtagtttagaaattctattttataccaaatcaatccctgtgtcaaatatcgagctgacgcatatttccgctgttaccgttccccccccgctaaaaagcggcgtggtgcgaacagtaactttttgctgccgtccgtacatcgcaacaggtaagaagcctggactgttgccgagaatccctgtgcctgccgataacggcaaatacagggattctcgtatggctgctattatttcaaatactttttaggcccgtatcatctggcggatatctccaaatgccgcggcaactttatgatacttcagttccgtcatctcaccggtcagaacggcaaactcgtccatgccgggcaattcaattatttccgtttttccaaaagcggcttccacatcagccagcttctcggccgcagaacctgcaaagcggataaaataacggaaccgcatctccttgacatcggaaagctgctgcttctcactgctccagccgagaggaacattatccgtcatatggcaggcggcctccataatatcggcaactaccgcgctggccgtcggcagcttaccggcgccgcttccataaaacatcagcgtccccaccatattgccgcggaccatcaccgcgttaaatacgtcgctcactccataaagggggtgatccctgtctatcatcatcgggcatacgaatacgcttgttttcccgtcagccatgcggctgcttccaaaaagcttgatggaggttcccatcttagccgcatatttgaaatccgtatccgtaatctttgtaattccctccgtatacacttcctcataattcacttctttttcaagtgcaagggaggtcagaatcgtgattttacggcaggtatcatatccttcgacatccgcctccggattacgctccgcatatccaagctcctgagcctttttgagggcttcctcaaacgtctgcccctcacggtccatcttgctgagaataaagtttgtcgtaccgttcaggataccgctgatttccagaatctgttctcctgccaggcactgaaccatcgggcggataatcgggatcccgcctcccacgctggcttcgaagaagaaattaatatttttatccctggcaatctggagaagctctgttccatgggccgccaccagcgccttattggatgtaactacctgtttaccggcaagcaggcaggcctttgcaaaagcgtaagcgggattcactccgcccatggcctccacaacaattcccacatccggatccttttctatagtggaaaaatcatgtactatcaggtcctcatgcggatctcccggaaattcacgcagatccagaatgtattttaccgaaatatcctgaccggtctttctctttataatctctctgttcgtctctaacacttccacgacgccggaaccaatcgttccgtaacccattactgctacctgaatcataatctctactccctggctattattttgacatagtgaacgccctttttctcttccatttcctcaaccatcctggaaatattaccggtatccggcctgacttccacgctcagtgtcagcgaggccacgttattgaccggaatactctgatggatagtcagaatattcgccttatagaccgctacggtgtgaagaagatccgacaacagcccctgctcgtcgtccatctgcagcaccagcgtgattgtttttccctttgcgttgtcgtaaaacgggaaaatatcgtctttgtacttatagaaggaacttctgctgatccccactttctccgtggcctcctgtatcgtgatggcgcgctctgattctatcagtttttttgcctccaccaccttcagcaaaacttccggcaccgccttttgttttaacacaaaatattttgtctgctcttccatatacactcccctgcgctgtacgtctttatgtatgcttgagaaatacatttgtattcatagcaaagatattaacacatttaaaatgtgggtgcaataactttttacgtggaaattcgatttttatacgtataaattgttttttatgcaatacaaagcctgctcaccgcaaaattgcggcggcaggctctggttaatctgtctttattcaaaagctgtagcggcgccggaaccattcggctctgtaccgcctctggttttgctgcccctgattctccagtccgcttccgcatcattaaccggaagcgccttaaagataaacagccctgtggatgcacacagaatactgaccgctatattgacgtaggcaaacacgacatagggagcgaaaaggggagccgtaaacccgaacagccccatataatagatgcagcccgtattccagggaaccagcggaagaataatcgtattagcctcctcaatcgttctagacataacacttcggtgaattcctctttgatcataaagttccctgaacatgtttcccatcagcactaccgatacataaaaatttgtcacaagcagaaccgtaagaattccacagacaagtgtcaaaagaattgtggaacagtccgagcggatcgtttttgtgatgcggcctactattacatggaggaaaccagcctcgctgagtatccctcccaatgcaagagccagaacagcggtacagattgtcgtcatcatggaagaaatgccccccttgctcagcatactgtccacaaccgccgtacctgtctctaccttaacgccgttataaattacggataacacttctatcaggctgaccttctggacaatcattgccagaaccagaccggaaaaaccggaaataagaatagccagaatagccggcactttcttcaggcttaatattacaatgagaataaccggaaccagtaaaagcagattgaaatgatacagatttgccagactgcccctgactgtgctgattacgccctgctccatcgccaaatccgcatatccggcgcccaggaagtaaaaaatcacaaggctgattaatacggacggaaccgttgtgtaaagcatggagcgcacatggtaatagatattgatatcactggtgctggaggccagaatcgtggaatcggacagcggcgacagcttatctcccagaattgaaccggaaatagccgccccggcagtcagaggcaccggtattcccatactcatgccaatgctcacacaggccacacccattgtacccgcggttcccagggaagtgccgatacagagtgacagcagggaacacataataaaggtaaggggaagaagcatgcgcggtgtaataaatcccaggccataatagattatcatcggaaccgtaccgcatttaatccatgcggctatgagaattcctacaaacaccaaaatcattacacagtcaatggcccgttttacaccgcttatcatacctttctcaaggtcgctgtagcggtatccggccagcatggcgatgatgagaaccagaaaaatgttaactaccagtagcggaatcgtggcaaccccggcgataattcccgatgtgagaaccgccgcaatcacggccaaaacagtaacagacaataataaacctggttttcctgtagctttcttcatagacatctctccttcactgatgaacttacagaaaacaaaaaagcacccggaaattccgagtggcgaaggctgctgcaggctgtttactttgattgagccaatcaaaacaaagcgccggattgaaaaaaatgcgcttgcccttccttcgcctacgagattagctgacgggttcggggaagaaggtcccctatcgccccaaggcgaatgcaccccaataattggttctcccgctgccccagcccggttcgcaggctgaaggcattcggcgtgatatgttttctgttttattatctaactgttaatatgattttaacaatttttctgtgtatttacaatataatatagaaataattaataaaactttaaaaagcgggaaaaccgctctgatgccggtcttcccgctctgccgtcaccggcttactgttctttaacctcctggcttttcaggctgatccatttcagatatgcactgataaacagatcgatatcgccgtccatcaccgcatttacattgccgttctcggcattggtgcggtgatccttgaccagtgtatagggctgcataacataggaacggatctggtttccaaaattgatatccttgacatcgccccggatatcggaaagcttctccgcattctcctgctgctttaacagatagagctttgcctttaacatctgcattgccttatccttattctggaactgggagcgctcattctggcactgcaccacgattccggtcgggatatgggtaatacggatggcagacgacgtcttgttgatatgctgtccgcctgcgccgctggatcggtaggtatcaatacgcagatcatcctgattgacctcaatatccagatcttcttcaatatccggcatgacatcacaggatacaaaggaagtctgcctctttcctgccgcattaaacggtgaaatacgtaccagccggtgaacgcctttttctgatttcaggtatccaaaagcattctcgccgttaatctgcacagtgattgacttgattcccgcctcatcaccgtccaggaaatccagcacttcggtcgtatatcccttcttgtcggcccatctctggtacatccggtacagcatgctgcaccagtccatggcctcagttccgcctgctcccgcattcagcttcaaaatcgcgttgcagttatcatactctccggaaagcagcgtttttgtcctgatatcttcaaggctgttgataaattcatccagcatctcctgaatttcagggatcatcgagggatcattctcctcgtatcccatctctatcattatctggatatcctcatactgctgctccagatggcggtaagtctccaccgtgtcctttagattctttgcttctcttactgtttttgtggacctctccggatcgtcccagaatcccggttcctccattgatttgtccaattcatcgattcgctttaccttgttatccaggtcaaagtgaatccctcacttccactaaagttgtatcatacgttgataacgtatatttgaactgatctaattcaaccatagcttcacccactttcattctattatagtcagacatgttttattttacaggaatggttgttgatttacaaggtgtatttgcaaaatttaaataagcaggtgaggacgccgccggtacggccagcggacggggtggtggggtgtgtatatgagtctttcgcgttaagtgcgggggcggaccttgtcgcggccactcagtgcttacgtgtgctggaaataccatatgactacaatgtgcctttatgaaagaattgcgctagatttgatatcggcctgccggaaacacgtagtgaccgcgacagggtcctccccatttaaggttggagacaatcagcggccggagcggaccatgtccggtgccgcgaaaacttccgcctgagtgttccgtacccggcgaaaacctgaaccggggaagtaggcggaatcaattgcggaggggacatgggagtccgccggtgcttggcgaggtccctcacgagcttagcactgctgcgcactccaaagagtgcaaacggtccccgcagcaattcattccggccggattccccctccacaaccgacttcccacggggacggaagactcagccatccccctcaccacaccggacatggtccgttccggacgcgtcctcccaacctcagttaaatctctatttctcttccttcttcccgccctgcggcagaatctgcatctgaaccgtcttattcttaagctccggattggaattcatctcctgcagtattttgcgtccgcagcactgtttgaatttcttgccggaaccgcatggacacggatcatttggataaatctttttcgcctcacgctttttcggcgcattgacggcggtatcatccttgttggttcccgtcaccttggccgccggttcacgctccaccttctgctccacacggatatggaacaggatgcgcactgtatcttcacggattgcggcagtcatgctgtcgaacatctcatatccgctcatcttatactctaccagaggatctctctggccatatgcctggaggccgataccttcacggagctgatccatatcatcaatatgagccatccattttgcatcgattactttcagaagaataacacgctcgatctcacggatctgctctgcctccgggaactctgcttccttggcttcgtaaagctttgtggcagcctccttcagcatgtgctttaattcattcttcttcatatccttctgatcgtctttcagcgcgacaggaggaagcggaataatcggaagcagcagtgtattcagctccgtcagatcccattcttctgttccctgttcatcagagatggacatatccacagcattttctacaatatccgtaatcatcttcataattacggttctcatgctttcaccgtttaatacgcggcggcgctcgtcataaatgacctcacgctgttcgttcataacctcatcatatttcagcaggttttcacggataccgtagttgttgttctcgatcttcatctgggctttttcaatggcgtttgaaagcatcttatgctctatctgctcattctccggaacgcccaatgcgttaaacatattcatcagcttctcggaaccgaagagacgcatcagatcgtcttccagagaaatgtagaaacgggattcacccggatctccctgacgtccggaacgcccgcgcagctgattatcgatacgtctggattcatggcgctcggtaccgatgatcttgagaccgccgatttccttcgccttgtcgtccagcttgatatccgtaccacggccggccatgttggtagcgatggttaccgcgccgtgtacaccggcatcggctacaatctcagcctccatctcatggaatttggcattcagcaccttgtgcggcacgccgcgccttgtcagcatcttgcttaaaagctcggatgtctcgatcgtaatcgtacccaccagaacaggctgtcccttttcatgggctgccacaacctcatccacaacagcatggaatttctcttttttcgtcttatatacagcgtcgtcgttatcatgacggattaccggcttattcgtcggaattacgataacgtccatctggtaaatattacggaactccttctcctcggtctgagccgtaccggtcataccggccttctttgtaaacttattaaagaagttctggaatgtgatggttgcaagcgttctgctctcgcggcggacatttacatgctccttcgcctcgatggcctgatgaagtccgtcggaatagcggcggcccggcataatacgtcccgtaaactcatctacaatcaggacctcgtcgtccttcaccacataatccttatcgcggaacatcaggttgttggcgcgcagtgcaagaataatattatgctgaatctccaggttctgcggatccgccaggttctctatatggaagaattcctccactttcttgacgccggcctctgtcagattgaccaccttgtccttctcattgacaatgaagtcgcccgtctcctcaatctcttcacccatgatggccgatatctttgtaaattcggctgattcctctccgcgttccagctggcgcgccagaatatcgcagacttcatataacttggtggatttaccgctctgaccggaaatgataagcggtgtccgcgcctcgtcgatcaagacggaatcgacctcatcgatgatggcataatccagatttcttaaaaccatctgttccttatatatagccatattatcgcggagatagtcaaaaccaagctcattgttggttacataggtgatgtcacagttatatgccgcccggcgctcgtccggagtcatcgcatttaataccacgccgacggaaagtcccaggaatctgtgaacctctcccatccactcggcatctcgctttgccagatagtcgttaaccgtaacgataaatacgccgttgcccttcagcgcattcagataagccggggctgtggaaacaagcgtctttccttcacctgtcttcatctcggcaatacgtccctggtgcagaacaattccgccaatgagctgtaccggataatgctccatattaaggacacgccttgaggcttctctgatggtggcaaatgcctccggcagaatgtcatccaatgtttcacccttttccagacgctctctgaactttctggtattgtccttcagctcatcgtccgtcagcttttccatctccggcttcaaagcaacaatcttatccacaatgggataaatcagctttagttcacgctcgctgtgagttccaaacattttctctatcagattcatgctttactctcctatttctatcattatttctattatcatcattgcaagctcttctattcatgccaaaactgcatagttatagttatacaatcttacttattctaacactaacaaggattttattcaacgacttcataaattttttacattttgtccacatccgcgcaatagtttccagggcatcccagtgacataattcgtcatattatggtaaacttagcaaattgcacaaaaaacttgttctattcaccagttgtccacattatccacaccgttttcgccaaaaatgtagaaaagttatgcacaccccaccttgtccattttaagggaaaaagtagttatacaccgagttatccacattatccacatcttttttatgtttatcaccatctttccccatccaaagttcaccaacctgatttttgtgtatatctcataaacttgcatatttcgacaaaaaatacaaggattatccttgacaggaatatcaggttttatatgggttccgcgcgagttttaagtagttttgaagttactgttcacacggttgtgttccgcgaggtgttttcgtgcgcattttgcacgaaaatcccgagttttacggcgcgaaacggcgctttttgccgtttctgtgcatcgcgaagcgtgttattgttcgcagcacgccgctttttggcgggatgtaaacaataacgttttgaaacattatgacgcctaaataatttagactttttataaaaaattaacaataattgtcttcgcaattttccttttgtgattgaatttatcaaataaaagtggtatactataaacatcccaagaaaaaggagcgatgtatatgcgttataagattactggaagaaatattaatgttaccccggggttaaaagcagcagtagaggagaaaatcggaaaacttgagcgatacttcaatcaggacacagaagcaatcattacattaagtgttgaaaaagaacgtcagaaaatcgaagttaccattcctgtaaaaggcaccattatccgtgcggagcaggaaagcaacgatatgtacgtatccattgatttggtagaagaaattatcgagcgccagcttaaaaaatataaaaacaagattgttgacaaaaaacaggcggctattgcattctccgattatttcatgaatgaagagtatgaatcggatgacgaagtaaaaattgttaaagttaagagattcgcgatgaaaccgatggatccggaggaagcttgtgtacagatggaacttcttggacatgccttctatgtattccttaattcggaaaccgaccaggtgaatgtggtttacaagaggaaaggcaatacctacggattgattgagccggaattttagaattggcccgttaagccggtattataagcatagcagtggggagaaccgattgacggttctccccatttaaaatgccgccaaagcagccactgctctgtgaaattcatggttccgcggaggttcgcactgcggcggcacggattgtacagctagtccaaatcgaacagttcgcgctttacgagacggatctccgcatagatactgtcttttcttaacttcccggcctccggcgtctctgggccgattatgattgtcattccatccatatcgccgttaaatgccatttccagccggtaccattggtcactggcgccgcttcccaggcttcctttctgccccggttcgcctgcaaccttcactaccggaaagctcgaaaccgtattttcttccggaagttcccctattgtgtaggccgattcatcaaataccgccaccgacggaaggccgtcttcattcagttcacccttcttcccgattgccaacggtaccgtctcattgtctgcggcattcatcttttgtacccggaacagaagctccagcttgtcgtcgtaagcatcgtaataacaggtatagcggttcggcgcaccggtatttcccgccagttcaattcccgataccgttcctccttccaatactacggtatcatagaaggacgtctccgccgcctcactgttcagggcggcgtaaaccgtattgatgaacagtttcatttccatatccggaaccagttcatcatcagaacctgattcatccgtgtcgtcataaagtgaaaagccggtataatagattttaccttttgaatatagatagtaattgtttccggcgtctcttaccgttgtatcaaaatatttagattcatcgtcaatgcccgaacctgcaaatgtataccagaccgtcacatcgtcaactttccccttgccaggctcccgctctaaatcaagctgataatatggggcatggttctctgctatcccaattttcgcttccgaaacttcattttcaatcttatatggatacaggccaatctgcccctcattgagcggttcaatatactgtgtacggggtttcacaccgatggcaaggttctgtgatatctgtgtattgtaaggcgaagtggtattcaccagagcctcataactgctgcccgcctttggtataaatgcatattccagcaaggctccgtttgtaaagccctggagctgctctatctttgtccaccgcctgctgcttcccttatctcttttgtcgtccggcttgatatcggttgtcacggcaaaacggtccatacccaccgcatagcgcagcgattgcgtaaagaaataattccagttgtttttatgaggatacagcgcatcgccttttccggccacattgttaagagtatactttgtctcaacgggattatcgctgtctccggctacttttttctgccatacataaccgtagaaattcgtcacgtcctcctcgagacggatggacaggtaatcggcgccgttcgacttgaatttatagtaagtatcccccgcgattacgattggagccgtctcatccacgatatctttggaaattgcttcgtagcttccgagagctgcatggagatctttgacattaaatgtattttttttgattgtggttctcaggggattcccaccggcatcttcatacagagatctcagctccccttccgtcacataaccgttcctggcataaaagtagtaaatccagctaaatgttctgtctatcatattcctgaattcgttatagaattgggctgcgttaacttttaccggcggggaattgggattcactgtctttacctcttttcctcctccattaaaccacccgccccaggtttgccacccgatatacagctccgaaatttctctcccgtcatcggctgcagtcggcctcacaagagccttataagatcctgctttttcagccacctcatggagaccctccggatcgagatagacggtcccgtttccaatattatgctgattgtcattccactctttctcatttttttccagataagcttcatactgttctttactaatcctgacctttttgtagtttggatctgtttctgtcggcttctccctctgcccttcttcaatcgtcatattgcggtaataataatcaacttcctccggggcaaagtaattctccgaattgacataggaaaatgcatcgtttgtaaagataattggttttttgagtgtatccgaatattcctttaaaactttggccgcctccagagtatccgtatccgttatatcgcctttcagctcctgtgaaaaatcggttcccacaatgattaaatcatatgcctttaatttttccgcagtaatttccttaccctcacattctgcagcaaaatcgccttcggaaattgtttcaaatccggcattttcaaagtcgatatgatactccccgcccttttgctccgcctcattaaacagacggacaaactgtggattctgtgacagattcttacctcctgccgtatcggaatacggcgtaatctgcagtatcttcacgtccttcttctttgtatcaggatgcaggtatccggtccagactccggtgagaggattatttttatcaagagtcgaaatctgtacgcggaactggcatatttcctcgattgactcaaccggcacaggagaagtatatctgcctttcagcaagccgctctcaaaggtataatcccccgggggcaaatcgccgaattttacggtaaacacctgatcatttttaatataatccgttgaattattttctttacccggtttgcctgagccgtttcctccgtctcccgcttcatcgaaaataccatcgccgttccgatccacaatgattgtcattaccatattctctgcctgatcgcctatgggcagcgtgatttcgtagtcaaacgtcaatgtattcgttctggcaagcgcagtcagatccggctttgtctccggattccatcctttctcagcgattgaagaaacagcatttccgttttcatcctttattaacccggtatcttttaccacaattgacggtttataatctttcatcaatgagattgttttacctgccgcttcttcaagaccggtacgcattgatatcagccgattatagtaagtttcttccggggctttcgtataatagtccctctcatcctccattccgtacaatgcgaaatataatctggcatccaaatccagctcctcttcgtatggcctggaatccatatcgatgaaaatgaaatcgccgatttgtttcctcgcatctaccaggagacgatctgccacaataaccggctggcctgattttacgaattccgccagctgccgctgcatatatgagcttatatcattgccgctgaatctggccttgctgactgactcatcggctcctaatacctgaagttccaatgccagttccacatttttcaggaaataatagtcgggtgttttgggccactgctccctcaatccgggattccagtaccggctgctgctgaccgtaagaggataagaccctgtattcagcgaggcgccctcttttttcattgcaataccggcatcaaattttgcttttgtcgtataatcacctgccagtaaaccgttgagcagggtctgaggaattaccgcatcatccaggtaaccgttatggcggtaaggaatgccgctgctgtaagggccttccgccctgaaaagagaggtgtcttcccctattaatattaaatcatactccgccgtcaaatctaccgccataccatttaatgtatttggcgtcacgtatgtaacggaaatttcgtcttcatcttcaccaatcgccgttgcaagttttgacagattttccggaatcacaagccagtaattattggatggttcgatttccagtaccttgatccgtccatctgccgcctcctggggcggtccgtccggcgttaccgctcctcctaataaaatctcttccacatcaatctggtgtttggagctttcgcctaagaggaccggaacaaacgggtaactgatccatccttccatataacggatcacattatcccactttgttttgccgatgtaacctccgttatgcaggagatcatatccggcttcatacttgtcttcaagtttacaaatttgatgcttttcatactttacccggtaatttccaaacgcctgataatcctcttccgtgatttttccggcactgccctctttatctctcagcagccttgcatactttaataacgcatcccataattcggaatccataaactcataaaagtcttcatttgaaaggctgcccattgtcctgaaccgttccaggaatgtttttacattgtccggcggcgcatattgttcagacggattataaataaaatatttcagcttttcaaaactgtttgtaaaggtggtacggtcgagcagaacggcatcataaaataacttttcattccaggatgtttctccgttaaagcttccagttctgacgccttctccgttgacagccgtggtaatcatttcttttattccgtcatcgatataggcttttccgctcagctttgttaaaagcagaattaatttatcaatatttttatccgcatttccggctgacttttcagatgccacaattgtcgccttattgtttgtataggcatgatccagaacagccagcgccgcatcccattgcatatccattgatttccagctattcccattatcttccgaaatgctgccctcatagacggcctggccccctttatttggctcaatgacctttcctttttcatcctttaatatgactgacggtttattatatttccaatatgcatacagcggattccggttatcgcctccggactggttgtatttataggccgactcattactttggactataataagatcggctctttccacgtcctgaaccgttatatcgcatgcgctctcagaccttacctgaactttgcctgcccagtcctccgcttttttgccgctctggcagagaatgttcttcacaaaaatgttattgttggcgtaccgtctgttttctttatctctcaccagacctgagaatggaaattcaataaaaaatgttgcattattgtttccccagtctaagctccagtaatcttttaactcctgttcttccgtataatacctattgattgcctcgactgtcacaggttcctgtccttcgaccaaatacccccattgtccctgtccttcgtaaggtactatctccaaaaccacaaagggatgttctttgctgtatctggtcggatcgagcgcggcttccgcctgctgtctgcggcctgcaatcagcaatatcccgccggccagcacgcagatcaccagtatcgccgccacggctttccatacagtatgcagtttttttccgtcccacggaaatctctttttctttttctgtacgcgaacttccattcctgcctcctgatgcgccatcggtttgaattaacatttttacggccagtacggacctgtattgggtcatgcccctgtttcgggcccgccgcctgtaccggtttctccattccaccataaaaccgctatcctgttacggggcgcggcactggttgtcacaaaatagcttttactgtccagatattggaaagtcagagcaaaattcacacttattttcccatctgttttgtagaatccatcgtcttcattaatccgctcattttccgtcaattcagggaaaattgtaaaatcaagcttctttactttatcgctgatcagatattcccggccattacctgcattttcttctaatgctgccctgaccgtctccaaagacaggactccaggatttcccgatattttatcccttgtcccgtcatggctctctccgcctgcgatgtccgggccggaattaatgtcttgttcggccttaaagccgctgttttgatacagacagccggtctccttgttgaaccagaatatctcaccggagtatacattctttccggcttccgttttcacctcaccggtaaacagatagcttccgcgttccccttcattcagatataatgaaccggctcccatgatcgcattgctgattttccggctgactgcctggctctcagtctggatattggagtaagacgccgtagaacggtagaggcgggtggaactgctaaacagtgatgttatcataagacccactactgccaaaactgaaataccgaccagtaattcaattagtgaaaagcctccgtttccggactctgtaaatgaatttaatgaattcggctctttgctttttctttccacgcgtcttcctcctttccgcccgatttttgtcttttcatcgcgccgcactactcgggattttcgcaagaaacagcgaaaacgcctcgcggaatacatcatggctgaactgtcacagattttttccctacttcacattgctgatatcgacccggccattttctttataaactgtaatggttctggtacgtcccacgccggtgaccttaagagtgcccgctccctccatgcaggagcctgtatcccggtcgaaccgccatgcatgaatcagcttccccttctccaggctgccctctccggttccggcgccgtctgaaacgttcccttcaccgtcaggatcgccgcttccggacacccattcataatcaaccgcgccggcatgccccagtctgactttctctgaccggctttcccaatatacgccgcctgactccccggatgccttttcctcgctctccaggatacagtaatattctttttccttcagataaagtcccagccgccacttgcccgccttagacatggaggccgtccgggccatcaagatctcattgccgagagcggccgcatacttctccgtttcttttcttcttgctgaatcgcttcccagaaaaatcatgccgctgagaacaagcagaatggtcatggcaataattagctctatcagtgaaaaaccgctgttggtattgtctttcatcatttgccgcctccccgctcacgtccggaacggctccagttctctctcgtaacaaagtcttcatagtcgttcagcacagtggaggccggatcgctgtaatcataaaaatattttgcagtctcttctctgtccagaatgggttcgtaagtctgcccatcggcggtcagccttgcgctgcccgtaacagatatctgacctgccgccataaacaggccgttaaacgctccctctcctccaatctcaatatcttttgccgatacaaccagccctccgtccatagaaaaagttctccccagagttgtgactgacgcgctgtccccaccggcccccagctctacatgaaccgagtccccgctcagcagcacacagcatccgttttctttgatatagaccggttctcctattagttttttcacttcatcaattttaacataatttccaatcggcagtatcgatgaaattcccatggcagcttctccggcacgccctccgacacggtctgtctccgccagattgtcctgtatatttttaaaagaggcattcagatttccaatcaggttcacccattcaagtttactgccgacaccgtcctcccccttcttaaggagctgaaaaagatgttcatcctcccctttatccccggctacctgatatagggcgcctgatgtatgaatctgctgggacccgctgcctttaatatatattccgctgccgtcaccgccggctgtcccgccgcttttccccatacggcttttctccagcagatcgtcaaaagatgaagcgtttttatccagataattgacaaaatagtcccttctctcactttccgaatcaaaattataatagatataaacctttccatttaaaattaccgggacaaccggggagtcctgtgttccgggtcctgtaactgtaatctctttttccgaatcgctttctgcctgggattgtctatccgtatctgatactccgccttcttcccgcccatttcatcgggaagctcgacctgaagcgccagtgtatagccatccgcctcatcgggcaagagtaccgggttggaaccggcagcctgtgtatttccattccatgccaggcgaatggatgtctccggtatcaaatacatcgtctgagtggccttaacggccagtgattctcccatcgggtaaacgtactgcccgttcgtaatcgtatcgtcaaatctcatataggcccgtccggccagtatcagggagtcaaggcccgtcaaatcaagactgctccccctgtcatttataataaccgcgctgcttttattcggtgtttcctgttccagcgcgctgctgtccccttcgtttccgtagccgtaataagagcctttcagggtaacattattcttatcgcccttcagggtcaaatcatccttgacaaatatgtcggcatcctcagcggtcagggtggatgaggcgttaagctcaatcccgtctgcccagacgcggctcttcgccccggtattcacagcagggaaaattgtaagctccgcacggttgtcagccgttatatttccctttgccgcaattaaccggcccgccgcgtcaagctcgctgtggaataccgtaattgaattgccgtatatgtttccggtaaactcattcactgttctgcttgtgccgttctggtttacttttatatccccattcgccgccaggacatagtcaagcagtgcatcgccttcattcatgaaccttacatagggcgcccgtattcttaaatccacggtgactgccgactcaattccggtatccggatttgtataaatcagacagaagcctttcagggtgataccgctgtagctgtcccgcggaccggggacggacagaggcgccgcattgccggagccggtcatcgcaagctcttccccttccggcataacctgtttctccatgataattgaatcgataaaaacctccagattctgtttctgtatcgtatccgaaaaagaggccagtttctcagccgcatttttaagattttcctcattgttttcatcagtgagaggaagtgataatcccaaagcgttttcgcctgtcagttccttcataaaaccggctctcagccaggcgttcgcctcatcgtttgttctgcagccatctttataaagcttctccatcacgccaagatagttttctttcaggatgtcactcgccattcttcctgtctgcgcataaatctcatcgagcgctgtctcaagatagtaaaaattcttgtctgatttccggttcaaatctctcattctgacattcaaaagcgcggagcttaaagccataatccccaatatggcaatcagagaaaggacagtcagcgccagaatcatggcggaacctgaattattcagttttttcttctccggcaaatggtttttaactcttctcattccggaacctcctgtctcttttgctgccgtaattctgccggcctcaccacttttctatcactcttactctgattttgttgaatccagtttcaatatttcccggcccctgccgggttctgcgcctgttccctccgtcccgctgtaatcggcttcgtaaacagtcacagtcaaatgatatagcctgttttcgggttcgtggtaggatatcggttcattttcctcaccgatattcgtataaatcaacatcccgctgttttcagatgactcgatctttatcttctcatccccggcttgctcatatgcgccgggactgcctgctaccaaaaagaattctatcggatcctccaggtcatagcttataaaaattctgtcgaaaccgggaaaaccggattcttcgccggccgcttccggagcaatgcttttttctccgctgccgttctccctcacttcagtcctaatgtatttaatatccttatccggaagaaaaagatagatccggttggaaggccggccgttgtcctctctgacaatgtttctcttcactgatgccaggcttgccccgattgaaacatccggatccggatgaccctcattatccgcttccaccgtatatactgcttccgcctgaacggtcaaaactccgccgtcatctgactctccttcatggccgccggccgtctctaaaatatgtacccgcaaatatcgttccacttcgctttcgctgtagctgtccccgccggaactctccccggcaccgtcccctgtcacgccgtctgatgcatccagcccctcacccgtctcctcttcctcgttcaccttcatcagaagctgcgaggtcaagagctcatcctctttcatcagtgtctgcggatcaattaccgcattctgaaagctgcttacatcggcaatattcggcatctcatagcgattgatagagtatgaacgattcatctcctcatcttcccggctgtactttccaaaatcagcttctgcgctgatgatataggacgctctcccgtcccccgacggattgtgtccgtattcggctgtaagacggtagccctgtctttgtccggtctctgaagcgccatcctgtcctccgccttctccgccgccggcttcccttccggctccttcctcttccaggcgctcgattcgatacatcgtattccctatcataatccggccaccggctgtaccttcaccctctgccagaaacttctctaattcttcaaacggataccctttcagttcctccatcgtccgcttcgccgcatccagcagcaattcgtctttcctggctttggtattcatccttctgcttactacaaacgactgaaggagcacgcctgccatgatagaaagaacagcaagcgcgattaacagttcaatcagcgtaaatcctccgtcctttttctccatggcagccgtgctcctttccataaacggcctgacaccagaccgttccgctcctatcacaatccctgctgttaaagtgttccgtcacttcagtatctccacatcacctgtccggctttcgaccacgaatctgggccttgcgtcatcatcgccggtcacggcaatccgcatctttttcgaagtccggttctcaatccggacttttacctggctcagatccgtgccgcccattctgggagagctgagtacatagatgtcaatcgtgtctcccttcgtgtaaagcacgcggggacgtccgttttcacccagcgtataagtgatactgctgttttccccgttttcttctgcttttatggtcaatatctcctcttcattcttgtcggatattatcttctcgctgtcatccgggcctgccacgaccttggcattcacatccgatgcagacgggaacagcatgatataacagtcgtaatcgctctttatcgcctcgatctgttccaccgtgccgccattataggatagagccgtaccggagcggaaaatattgtccgtaccgattggcaccgtaatctttggttcttcaaatatccggtcttccccacgcactgcatactggtacattgttactgttgcatccaccacattcgtttcctggttataggaagccgtaatctgggggatcgtatttttatcctgataggagaatacgtagtccagtaaatctttccacttcccatactccagactgaccggaatctgcaaggtactcattaccagcgtatacggcataatatttccctgttctgtggtctgaaattgatagatttcggccggatccgtgtaggagacggataccacctgagtatcgaaccgttcttccagccccgtcacaaacataatctgctgcacctgtgagatgtccccggatacctgccgagcatcagtgtataagcctcgttataatcctttgtcttttgaatatactcatccttttgctgaagaatccggatacgctcatcgtattcctgccggagctcttccttcctggccgtcatttcctctgtctttttctcaatattctttgctcccaggaaccatgatgcggcaacaatccctatggacagtacgagaaaaatcagctccttgtctctcgaagttatcttcatgatgccgtccccccgctttctaaaccttttgcggaagccggaccgctcccctccgctgccgcccctgccggaatatcggcatttgtattatcaggtacagtaaccggcgccggttccggcccggtccctccattttccgcccccggatttgccgtccccgaatttgcctcacctggatttgcctcacctggatttgcctcacctggatttgcctcacctggatttgctgcaggcgcatcaggcacttgtcccccaggagtctgctccgtcacaggcacggccgctgcatcagcctcgccagccggagccaccgccgcagcatttacctgagctgccaattgtgtctgtccggattccagtccgccttcttctatatccgcactttggacattattcttctccaaaacttcgttttccgtaccggctgcatccgtatcatcgccgctggttccgtcttcttccacgccttcatccggcgcccatatttcactgtattcatccggcatcatgttctccaatgcctcttcctttgttcccggattcaagatggaatcctgattgatcagagtacaggtcagggaaaatgcaaccgtttcctgatttccttcaaatacgcttgaaagtgcgctgaccttcacctcggatacattggcaatcatacctagctgctgaatcagcttcgccaccgtcttcttcccctgggccagtgccgagaagctcacctgaccctcgctgcagctaaagctttgaatcgaaatattgcttggacgaagctgctcaaatatatcaataaagttcgaaagactctcgttattggttcttaccagagactgaacctgcacaacgtcggaataacgcgtctgagcctgtctgtagttatccagtatcggttttacgtcctccaccgtcagtaatttattctgtagatcaatggtttccattgcctcattgaagaaattggttgccggaacagtgacaattacaaccgacgcgaacaatgccagcagaatcataacacggtaagccttggcctccagcttccgcctgatatcctgctccagttgtttcggtatcagatccaccgggtccacaacagccccgatattatccatatatctgaggacttccttcatggaaagtcctgcactctcttttaccgacacttgtttcagcgccgtgatgcgttcaaccggcagattcagctgtttgtcaaacagctcatccaaaccggagatgcgtgagccgtccccgattatgtaaacaagctccagaggatggtccgcattacggcctgtataatattcaattacccgtttgatgttgctgaccagataataaagagtgtctgtcagttcatccccatcatcgaaattgtcgtggattaactgcctgcgctccaattgttccagagcctcctcctggctgcagttcttcttatccataatggattgaaggagtgaaatgcttccaaaatccacatgacgctggagtaccataaccgtctcattataaattgtcaaaaccgtatgctcctcatccagctggattacaaggcatggctcatcgccaatttgattcgaggtcaactggaaaacactgttgccgatataatcaactgagataagcttcaggtgtgcaagcttggcggcatcataataagactgtaccatttcgttcggtaccgccaccaccatcagacgcagcttcgagcggatcctgccgattcccggctttttcctcttcgctttctttctctcctgcgtctcttcatcctcgtccccgttttctgtctcgtcctccaggattctcgatattgtaaaataagagagtacgtaatccgtcagctccaccggaaaatactccggtgcattcaccttcagggctgttttgagtttctcctccttcatctccggaagcactacttccctgctcataatccgatcagagggaagtgagaagacaaccttctttgtcttgatattggcatatttcaaagtggcgttaagatactcggcaaagccgcgcacatccacgattaatccgcctgaaacaaggctctccggcacttctttggtcagcagcctgtataccgaaacacctcgcctgccgttggataactctgcaattcttatgtggttgtcagtcaatacgattgatagcagcttgcccataagttgtcctttcacctgttgttctattcgttactgttcacacggttgcgttccgcggggtgttttcgtgcgcattttgcacgaaaatcccgagtttcacggcgcggcgcgatgaaaagtaaactttccaccacaatcaacaacgttttttgccgtttctgtgcatcgagaagcgtgttattgttcacagcacgccgcttttttagcagtatgtgaacagtatcttttattctgaacatgtctgcctcggcagagcatgattcttttcactgttaaaccggttacgcattattatgactcagcctgaaaccggatgctaaaattgattgatataccattgtatcagttcctgcccccacatcatggaaaaccatattcctgcggacaggtaagggccaaatgccagcatgcgctcttttccctgtatcttcatcagaaccagatgaatcacagaacctagaatacatccgcacgcaaaagccaggatgacattttgccatcccagaagaagaccggccgccgccatcagcttcacatctccgcctcccatggctctgcctttgctgagaagcagaatcagaagaagcagaccgctgacgcagataagccctatcatatatgtaagccagtcctgcctgttaaaccacaggtttaccagaccggctgttcctattacaatattacatcccaccggaatctcaaacgtacgccagtcaatgacgcttagtaccagaagggaggaagctgcaattgcataacagattcccgtcactgtaaaaccgtttttataaattaatcccacccataagaggccgttggccagctcaataagcgggtattgaaccgatattttctctccgcattttctgcaccgtccccgcaggaatatccagctgaatatggggattaagtcgtaccacgccagcttgtacccgcagttcatgcagtgggaattggtgtggacgatgtcctcgccgcgtggtatgcggtagatgcagacgttgaggaagctgccgatggtgatggcgaagagggcaattataaataataaaatgtacatttatgttattattccatatttttctattgcatttttataatcattaatcattattatcttttaaaataccaggaaagctgcaggcactaataagtgcctgcattcgttccttatcacatgatatattacccaatatggacaaatattaagtgattatttctctgtttcgcttggtacagcaggagtattagcacctacaggagacaatgttccacatccctttgtcgcatcaccagacttagcacaatatacaccaatttctaatcctgctgcaatttcatttccagtactatctgttttcgcttctacatatttaacaataactccgactacacctccagaagcttttttagacaccaatttaattgttttaccatctttgcttccgagtaatgtttgcaactcaacagcaaatttgtctgattcttttaaaatatcagttaattccattccttcgtctatagccttgtatgctccattttcagattcctttataaaatcctcataagcaccttcatcagcaaacgctccctgaacagccgtatacacagtatccaatgtctgcatatccttcgcttccctggacttctcaatatacttcataaactgcggtgccagcagtcctgtcagaatgatcagtatcgcaatcgcgatgatcaattcaatcagtgaaaaacctttgttattctttttcttgttcattccaatctccttctttctttaagatttctcttagttttatatatgtaactccgccatgtcgggcgcacgacgtgagttaaatatctcttaagtcctccgcgtacctcacgccagtctacagattatccacactgctgtacagcgtaagcatcggagtaaatacggccgcaataattgcgattacaattacagccataaagataatgaccagcggttccagcgcggcggcagcctgttcggttgcagcggtcacctcttcctcataatactccgccaccttatcaagcatcgtgtctaatccgcctgtctcctcaccgattcccaccatatgataaaccatggagggaaagacgccgctttcctgcaatggaaccgaaagctggattcctcttgccacctgttcgcgtgcgtcgctgattgccagccggtaaaccgtgttatccatcgtgtttgccgtaatttccagcgcttctataattggcacgcctgcactgagcagcgtactcaggttccttgaaaactgggcgcaggctgtctttttcttcagctttccgacaagcggtatccgaagaacgagattggaatagacgtaatctcccgattccgtgcttccataggccctcagccccatgacaatggcaaaaatgccaatcaatataatataccagtatctggtcataaaattactcagtccgaccactgcccttgtaatcgcaggcagttctgcatccatatccacaaacatatcggaatacatcggcactatgtatacaagcatgacgattatgacaatcacagccacgatcgacaggataatcgggtaaatcatggccttcttgattatattctggagtttggccgtcttctcataatgcgccgccatccgttcaaatgacaatgacagctttcctgcctcctcaccggcctgaaccaggttgacgaacatcggagggaaaactttttcatggtgtctcatgctcccggccagcgtatcccccttttcaacagaggccctggtttcccggattgcttcttttaataatttattgaccgtctgctcttccagcatctccatagcacgtacgatactgataccggattccgtcagcgtgacgaactggcggcagaagacgctcatatctctgggcctgactcccggattcagaaacggaagttcaaactctttatcccatatgctgggagcatcaatggaaatcacggtattgccgtcgtttttcagtaccgccatcgcgtggggcctgtctgacgctgtgatgattccctttttttctttcccggccggggtaataacatgataacggtaattagccattccgctcgtctccttaatataacagacgtttttctatcgacaccggatccacagcatagtctaccagcatctttcgtgtgataatgcctgccctgtatttttccagcagggcgtcgtccatcgtaatcatcccggctttcctgtttgtctggatgatacttgggatctgataggttttgccgtcccggatcaggctgcggaccgccgtatttacatgcattacctcaaatactccggttcttccgctcccgtctgccttcggcagcagcctctgtgaaatgacagcctccataaccatggagagctggaccctgatctggtctttctgctcagccggaaaaacatctataattctgtcaatcgtagacgctgcgcctatcgtatgcagcgtggaaaaaacgagatggcccgtctccgcagccgtgatggccgtgctgattgtctccagatccctcatctcacctaccagaatgacatccggatcctccctcagggcagcgcgcagggcggccgcatagcttctcgtgtcaagtcctatctccctctggtttaccagggatttgctgtggcggtaaagatattcaatcggatcctccagcgtaataatatggtttctccttgtctcattaatccgctgtatcagtgacgcaagcgtcgtggatttaccgcttcctgtaggccctgtcaccagtacaagtccgctgttcttctggtacaggtcaataacggactggggcagtcccagggattcgggggtgggtacctctgtactcaccagacggaatgctgctgcaactgttcccctctggcggaaggcattaaccctgaaccggcccagtgccgggattccaaaggagaaatccacctcccccttatcttcaaacaggcttttctgccgttctcccatgatactttcaacaagctcctgcgtatcatcccccatcagtctcgggcagttttccatcgcaatcagcgctccgttgacacgcacctggggcggcactcctactgttatgtgaaggtcggaggcgttcagcttcttcgcctcccccaaaagttctgtcagatccatctgttagtcctcctcgctggcaatctttttcatctcctccaaggaggtaacgccttccctcaccagtctgactgcgcttcccctcagagtaatcataccttctctctgtgcaatctccttcaccttggatgaaggctgcatctttgtgattgcccatcgaagttccggtgttacaggcatcatctcgtagacggcagtccgcccgaaatatcctgtctggctgcaaagctggcagccggccggttcatagatggtcaggacttcgtcctggttcactcccagctcttccttttcctgcgcggtcgcctctctgcccctcttacagcggcagagttttcttacaagacgctgggccaccacgcccaccagggcatcggccataagatacggctcgattcccatgttcagcagcctggcaatactggcggaagtgctgttggtatgtaaagtactggccacaagatggccggtaatcgatgcctgaaccgcaatctccgcggtttcgggatctcgtatttctccaatcattataatatccggatcctgacgcagaatagaacgcagagccgacgcaaaggtcatatccgctttcggattcacctgaatctggtttactccgtcaatattcgcctccaccggatcttccaccgtaacaatattcaccgtctcacggttgagttcactgagcgccgtataaagtgtcgtggatttaccgcttcccgtagggccggtcacaagaataattccatgaggatgggccagcatctgatcaaaacgcttcatatcgtcgtcgctcagtcccagttctcttttatcccttgtcagtttctccttattagtcagacgcataacgatcttttcgccgtacacagtcggaatggaggaaacacggacatcgtattccacatggtctatgtccatcgtggtacggccgtcctgcggttttctcttctccgatatgtccatgccggaaataatcttcagcctggcaataattgccgtgtaaatcgacatatcatagctcatggcctccaccagatttccgtcgatacggaaccggatccggattccatccctcatcggctcaaagtggatgtcgctggctctctggcgcacggcctgctcgatgatggagcgtaccatcacgacaatcggggacgactccgtcagggagacttcgcctcttgcggcgtcacgcgccgcctcatctcttccctgttcttttttatattgatccgcaaccgcgatcaccgactggcgtccaaaataccggtcgatttgaaaggcaatctggctgcttgtgctgagaaccgggataatcttgaaattcgtgataatggcaatgtcatctattgccataaaatccatcggatcagacatggctacccgcatcatattgggattgtctttgtcaaaaccaatggggatcaggctgtatttttttgcaaccgtctcgtttatcgtatagacggcggcttcgtccagcttcatattgcgcagctccacatactcgatatgaagctgatcacacagtatcttcacaatcgcccgctccgagacatagccaaggctgatcagcgtctctccaagctttgtcccccgctgcctctgttccttcagcgcacgcatcagctgctcttccgtaataaggcctttttgaaccagtaaatcaccaaggcgtattcttttatttgtagccacgttctttcctccctcctgcatgatttgtccggcctgcgcggctggcatactcctgcccatcctgcgccgctgtcaaaaaaagaccttactcgacgcgcaaataaagtcccgggctcatgtcaggcatccgtgttgatatcccgccaaaccatctatatccaaggttttacacctatataattacactatacctgttagtatctaaaataccatatttataggaaaaagtccacattcagaccgtttaaatcgtaaaaaaaacttcataaaaattcattttttcgtcagaaatttcatatattggtaaatatctcctttatttcattttgttcatggatcacggacagggcgtctgcataggcagccgccccgtcacttgagccataacccgtttattcctctttcgcccatccataagcacatttaaccgctttattccagccgcgtatcctgttttccctatcctccatacaaatctccggttcaaacacacggtcaatggcccagtttctgagtacgtcttctttactctcccaatatcccactgccagtcccgcaagataagcggcgcccatagccgtagtctccacacactgcggacggcgcaccggggcctggatgatatcggactgcatctgcatcagcaggttattggcgctggcgccgccgtccactttcagggatgttaaggcaataccggaatcagccttcattgcctgaaggacgtcattggtctgaaacgcaagggattccagtgtggctctgataatgtggtatttattcacaccgcgtgtgatgccgacaactgtaccccgggcatattgatcccaatggggcgctcccagacctgtaaaggccggaaccacataacagccgttggtatcctttaccttgcccgccatatattcggaatcagccgatgaatcaatcagcctcatttcatcacgcagccactggatagcggctccggccacgaaaatagagccctccagcgcataattcactttgccgtcaattccccacgcaatggtcgtcaccaggccgttcttcgaataaacaggctgctcccctgtattcatcagtaaaaaacagcccgtcccatatgtattcttggcttcccccgcatgaaagcaggtctggccgaacagcgcggcctgctgatccccggctgcccctgatatcggaatcggaccgccgaagaactggtgatccgcctccccgtatacggaactggaaggttttacttccggcagcatgcatttcggaatattcagttcttccagaatctcggcgtcccactgcagcgtcctgatattaaacagcatggttctcgacgcattggagtaatccgttacatgtaccgctccccgtgtcagcttccaaatcagccaggtttccaccgttccgaagagaagctctccgcgctccgctctctctctggctccctcgacatgatccagtatccatttgagcttcgttcctgaaaaataagcgtcgatgacaagtcccgtcttttcacggaatttgtctgtcagtcctttttctttcagggaatcacagtattcggaggttctccggcattgccatacgatggcatggtagaccggttcccctgtaattttatcccatacaatggtcgtctctctctggtttgtgataccgatagccgcaatatcggcagcctccgccccaatctttgacatggcttccaccgccacgccgagctgggttgaccagatctcgttggcgtcatgctccacccagccgggctgcggaaaatactggcggaactccttctgggccgagctgcagatctcccctctttcattaaaaagtatacacctgttgctggttgtaccggcgtccagcgccataacataatttgccataaaatgaatcctccccgtattttctttccgaagcggacgttccgatcacatcagataaaccaggtcttctgattggtggaagatatagccgtagccccggcttcaattgccccgatgatatcggctttatcggcaatcagccctcccgcaataacgggacatgaaacgagcttcgacaccttggtgataatcttcggcatcaggccgggaagaatctccaccacatcgggctgtacggtatgatactgtttcctgatattatcgaaggccatggaatcaatgacaaagaaacggaacaccgtaacgagtcccagctcctttgcccgtttcacgatagccatcttggtggaaatgattccgtcagccagcgtctcctgcttaatgtaatccaccgccacttctttgccggaaagtcccgcgattaaatcaatatgtaccatcgccagctttcctgcgtcttttatctttttcaccatctgggggattcttatcaaatccccgtaaagtataaatacaatctgactttccgactcaagacatttttccagtccctcatcatctttgaccgccgctataaccggacaatcaattaatatatcatgaaatgcactccgcattatgtcccctccgctctctttatcttccgactgcctgtgtaatttaagaaaagagcagtgtgatcggcagtgattcccactgtcaataaccggctcctttctcctgataatattcataacagttcagccatgatgcattacgctcggcggtttttgccgtttctgtgcatcatttgctgcagtttgccgaaggctgaactgtaactaatatttaatttcactctagcatatcaccatggctttgtcaataaagacgcctctcggggcagagcctgtgaacggcagcaatggccgttcacagacggatgcctgtatagtacaaaacgttaatgcgtcagcttctgtttccactgtttctattcttaatataacaggttcggaatgaacatcgtcagtatcggaacataggtaacaataagcagcgccataagcagggcgatgataaacggaatacattctttaacaaaggtcgtcagttcacagcccgtaattgagcagcaggtgaacatcattgagccgaacggcggcgtcagtcctccgatcatgatattcacgatacagacaagaccgaaatgaaccagatccacgcccagtcccttcactacaggtacaagcagaggcgccaggataatcagcgctgctccgccctccaggaacatgcccagaaccagaagcaggacgttgataatcataagcatcacatacttattctgcgtgatacccagaagcagctccgtcagcatctggggaatacgctcccagctcatataatagccgaatacattggcggccacgataatcaggacaaccgtgctggttccctctatcgtctctctcagtacgagcggaatatgcgccggacggagattcttatatacaaaagcgccgataacaatgcaatataaaacagccacggctcctgcctcggacggtgtaaacagaccgatacgcagtcccagaatgattccgaacgggaataaaagcgcccagatggaatcaatggcctgatggccgatttccctggccgacgcacgcttctcacggctcggcgcataatgtcttttcttggaaatgatatttaccgtaatcatcaggcagatggccatgaaaatacccggcatataaccggccatgaatatctttcctactgaaacgccggcaatcagcgcatagacaatcaggttgattcccggcggaattaccggcgtaacggctgaggacgccgccgtgatcgccgctgagaagcccttgctgtagcccctcttctccatctccggcaccagcatcttacactgcatggccgcgtcggcgttggccgaaccggacacgccgcccatcagcatactgaggagtacgttgacctgggcaagccctcccggaagatggccggtcagcacatcggcaaaactcatcagcttcgtgctgattccggcatagttcataatggagcctgccattacgaagaacggaatcgcaagcagagggaatgactgtgtgctggtgataaacttctgcaaaatcaggtcggtcggtgagccggtattcagcacgccgaaatagaaaagtgaagatgcaaacagtgcgtatgcaatcggaattcctgagaaatacaggagaaatacgataattaccggtaaaaatgccatttactcttcccctttccaaaagtgcctgttttcacaatccgctttatatcatttgccatatggccgacggaataaatcgtagtcagacagaaaccgacaatcagcgcggagctgacccatgcggatgataccccaagtaccgccgtcggttttatataagacaggcgcacaaatactacgctcagataaaaaagatatccgttggtgaacaatagaatcagatcaaccaatatccttacaatattcctcattgtattcggtagcttattgacaagaatgtcaactccaatgtgcattccccttctatagcccgctgccgctcccaggaaaacacaccaaacaaaacagcttgtagtaacttcttcggtccagtaaagaccggttctcatgaaataacgcaaaaatacatttacaaggacgagacttgttgtgattacaataaagatggaggccaatatctcttcaaagtgtccaagtataaacttcacggttttattcataccattcttcctctctgatcaggaacacgcgtcacctcccgcgccgtacgcgggctcctgtaggacacgataaaaaggggaggggcaaagctcctcccccgcgaggttccattattttggcatattagcaattgcttctttgaatttgtcgtagagacccggtgtaacgtctttcatattgtcgtagattggcgcaactaattctgcaaatgctgcgttgtctacgtcattgaaggagattcccatctctgtttccagcttctgctttgtagcctcttcgccttcggagatgttcttaaccattgtctctgcgccttttgtaaactcttcctgcatgattgttctgtactcttccggaatcttgttccatacgtctacgctgatgtaagcgccgcaaacgcctaagagatgttttgtcatagccatgttctttgccacttccgcactgccgtttgtcgcatatgcgtcgattgttccttccagaccatctacaacgccctgctgaactgctgaaattgtctcagagaaagcgagtggtgtggctgtagcgcccatatggtttaatgtatcaacatataactggctgcctggtgtacggatcttcattccctttaagtcttccggctttgtgataaccttgtttgtcatgaggctcctgaaaccgaagatgtaatcgagggaaagaatcttgattcctttttcctcggctctcttgaacatatcctgtacttccggtgtttcgagaagatactcatattcatcgtaggaattaactaacatcgggcctgccaggatattgaaatccggaacatagtcgcccaggtaagacggatcttctacggaaatgaaatctgcgccgcggactacctgctctacaccgtctttataggttgcaagctgtccctgcggatatgtctgaatctcgatggcgccgtttgttctttcaagaatgtttgctgcgatggaatccatcgtctttgtaagctgctcttccggagcaaatacatggctcagctttaacaccagatgataatcatcagccggagccgctgcctcctggcttccctccgcttgtccttctgcctttggagcctgtgtctcggccggtttgctgctgcatcccgccatggatacgcagagcgcggttgctaatgcaagactcagtaccttcttcatttttctcattatttttcctccttttatcttaagggttttccccccaagtctcattcaaactgcctgaatcattccgtttcttttctgattcgtgtcacacggtcgggatagttgcctatgatggagtccacccctctggcaatcatggtccggatgtcttcttcttcattaacggtccatgtgttaattttgatgccctggctctttacttcggccaccacctctttagtcatattatagaaaatcggatggagacattcagcccctgcatacttcgtatagcgtccggcgtcaatcatccaagtctccgtcaaaagcccgcattccatatcgggacagagttctttcattctcctgatgctgaaatggttaaaggaagagatgatgattttctccttcagtccgaattcttcaatcaggtcatacacctttttctcgattcccggatactcaaaaattcctgtcttcagttcaatattggtgataatatgcgtatcttttaccagttcaaaatattccctgagtgcgggaacatgctgtgaatcgcactggccggcaaatttgaaggacacgtcaaacttcttcagctcttcatatgtataatccctcacaaagccggttccgttcacgcaggtacggtccagcttctcatcgtggataatcaccacttccccatcctttgtcagatggacatccatctcaataccgtcgcagccctctgtctgcacagctttctcaaaagccagcatcgtgttctcgggatacatcccgctgaaccctctgtgggcaaaattctttaccatggtaccctccctcagcttgcgcctgtatgtatttcctgtctcttccgataccctataaagccccggcatccctccgggcagacttaccggcaaagaaaaaagcggttcgaccaaagcagctcacttttgtgaactgtttctagtttgcgccgctctccaactctctgctctttatttatctatcgaaatttatagtgtaatcttaacactatttcaacaaataatcaagcatttttgtcgttattaccaatgttttttccatttaattgtctttttctgtatatattgacaaaaaattaaccaattctatttattcttcttattctgttttttcttctttttgcgttttaccggcttgacttctttttctatatcatagtcatcccgttcatccacgccttcgctgtattccctcaattcctccagcacactgtccgccaaatcgtcgtgatccgcggattcttcgcattcctcggtatcttcctcatccgacaggcattcacagtcttcggagctgtcgtcggcttcatcgcactcttcgccgctttcttcaccgcattcggaatccggaatctccggcacaagctctccatgctctgcctcttccccttcctccttctcctcaataacactgtcaagccctgtaatcacgtcaattttttcacacatgctgcttctatctgaagccgcgcattgaggctccgtatcctctttgtcacgggtcttcttgaaggcaatgctgcccgataagaacagggccgctttggcgctgatcgggcccaccatctcatagagaaccgaggaggacagaataatggtgagcatcagatttcccgtctccggcggcaggagcctctgtcccagaaacgccagaccgattgcgacgccggcctgagggatcagggcaagccccatatacttcctgatttccctgctggtgcccatagccagacagctgaaataagtgcccagatatttccccgcaatacggatcaggaaataagcgactcctatgactccgactgtccccagggcgttcacattcaggttcatgccggaaacaatgaaaaatatggacatgaccggaggcgtgaagttattgatctggcggaacagcttcttatccctggtcagattgatataagccgcgccgaacaccatacaggataacagcggagagatatcggcagccgcacagataccggaaagtcccaaaagcattgcgatagcaaggatgagacggttatccctgcttctggccggaatcagcaggcggctcagaaaataaccgcagaaaaatcccaggcagatggcgaacaggttcagcataatgggtatcagaatatcgttgacagtaagcgctcccgatgcccttccgttggcaatggctgccacgatactgaaagcaagaagacagacaacatcgtcaagggccactatctgaagcagcgtgttgacgaactctcctttggccttatactggttgatcgtcatcatcgtgctggccggagccgttgccgtggcgattgcgccgagaatcagggcgaaatcccagtccagacggaatataaactttaaaataaccgtcaccagcacgcccgccgtcagggcctcgctgattgttatcacgattatttttttgccggttctcatcagcacttcttttttaaagaatttcccgaccccaaaggcgataaaggccagggccaaatcactgacaaaccccattgaatcaatcatatgctgcggaataaaattaaggctgcagggaccgatcaggattcccgccaatatgtaaccgctcactttgggaagattcagggtattggtcagcctcgtcataatgaatccggcaaataatatgatcgaaagtacaaggagcgcttccgtctcctgatttaactgacttaaaaattcctgcatgttaagtcccccctgccaattattaatttatgaagacttacagatagcctttcatttccccagcgattcaaaaaccgcatccggcttcacggaagatttctccacatcctccgctttcgtctcaccggtcagcaccagaaaacctttcgcaccgttattgacaccggttgccacatccgtatagatacgatctccgacaaaagccaccgcctctttctctgttcccgtatgctccagcaccatatccaccgtttccttaaacggtttccccagatattttggctgtactccggtcgacagcgctatcgcggcgcacatggctccgcagtccggtatgaaaccgccctccacaggacagttgatatccagatgagtagccagaaataccgctccattcctgataaaggtgcaggcccgttccagcttttcataggtcagctccgtgtcaaatccaatcaccaccacatcaggctgctcctcccgtgccgcttccccgtctgtgggcaacagccggatcccggcctgcctaaaacttgcctccagcgcctttgttcccatcagatatactgtttttccgccgtagcattccttcagataacggattgtcacatcccccgatgtgacaatctgatctctggaaatgcggcaatccattttttccagttttctgatatagtcctccggtgatttggaagaattattcgtgaaaaacagaaacttctttcctgccgcttccaccgcatgaataaattccaaagcgccgtccagcctcctgtcccccagatagaacgttccgtccatatcaagtacaaacaggctgatttctttcagtatttctccgccggtcatatccgccctcctgtctctttttccgtcatttacttttcgccgttttatacggcttctaccgtctttgttgcaataatggaaacgccggtacccgcacagtcacggataatgacgtcccccatatggacaggcgccttcattctgactgcccggatctctttcatgatgtcaaatatctttccctttgggatatctttttctgttttaacggatgcccttgtcagtgtcccatcctccacaataacactggaggtcacaattcttgtcgggttggtcacctcttttttggcgtaagcctcacctttagcgcatgtatttcctgtcacggtaatattgtctccgtctgtcgtaacgctcaccggacagcccaaaggacagccgatacagatcagatctctcttttccatcactctacctccgtacaaatcactatcttctctaaatcaggataattcttaaagctgtcttttttcagaattacctgctccatctctccgggtgcgagaacctttttcttccgtttcgacactctctcatccccgtaataaacagagataaagcgatccttatatacatcggccacccggaaacgcacgaccacctgatcgttcatattccggatatcaagagactgaggcacggtgtaacgcacaccgtttgaagcttccagcctgacttcctttgtttcctctcccgccgtctctttcttaacataagccgccgcattctttcccgccaggttcgcttcctccgacacatagtccaccaggtcatgcacatgaaggacgttgccgcaggcaaagactccctctgcctctgtctgaagatgatcattgacattcgggcccgatgtgatccggttcatcgatacgccgatccctttcgtcagctcattctccggaatcagtccgacagacagaagaagtgtgtcgcaggaataatactcttcggttccggggatcggttttctgttcccgtcaacctcggcaatggtaatgcctgtaactctctcttttccgtgaatttccgtcacggtatggctcagcttcaacggaatatcatagtcgtcgagacactgtacaatatttctcttaaggccgccggaatatggcatcagctcggctaccaccttcaccttagctccctccagcgtcatacgccttgccatgataagcccgatatcacccgagcccaggattacaacttcctttcccacgctgtagccttctatattcatcagacgctgggcagttcccgccgaaaaaatgccggccggccggtaacccggaatattgagggcccctctcgggcgctccctgcatcccatggccaggatgactgcgcctgccttgatagtcacaagtccttcttctctgttgatgtaggtgacttctttttcactgttgatatcaattaccatcgtattcagcctgtaaggaattttttcttccgttaccatctcaatatagcgggctgcatattccggtcctgtaagttcttctttgaatgtatgaagtccgaatccgttatggatgcactgatttaaaatacctcccagcacgttatccctctccagaatcaggatatcctctactccggcgcggcgtgcggaaactgccgctgcaaggcctgccgggccgccgcctataattacaatatcatgatgcatcatcttaagtcctcctacttatcaccttttaacagttctgaaccggttctgtttttgcagacatcatccattgttatgccgagctctttcgccagaatttccatcgtcctcggcgtgcagaagcctgcctggcatctgcccatgcccgcgcgtaccctgcgcttgattccatccagggataccgccccgagcggtctgcgtatcgcgtcaattatctcaccctcgctgatattctcacagcggcagataatggtcccgtattccggatgttcttttataagcttggctctctcttcccgtggaagctcagccgctttgataaaaccttttctcgtcgctttaaaatctccttttatcgcggccccggcagcttctgcaatcatctgggccagatatttaccgagagccggcgcacaggaaagtcccggtgattcaattcctgcggcatcatagaagccctttgcatcctccgcctcaccgatgacaaattcatcgttcgcctcatgagcccgcagtcctgcaaaagaggtgatggtctgtctgaaagggatatttttcacgctccggacagatttagatatagcctccgccaggccctccgccgtcgtctccgttgcctctttatcctctatatcaattgccgtaggccctaccagaaggtttccgtggacggttggggatactaaaacgcctttgccgtatttgcccggaagctggaaaatcgtatgagatacatggttcccggcctctttatcgagaaggcagtagtcccctcttctgggaataatctgaagttttttctcacttaccatattgtggaacacatcggcatatacacctgccgcatttaccacgtactttgcatgcacctcaccattattcgtaatcagcctgtagccgaaatccgctttttcaatctgaaccacttctgtgttcatcttgaattccacgccgttttcatatgcattctcggccatggcaatggtcaggccgaagggacatacaattccgccggtaggcgcatagatagcagccaccaccgtatcgctgacattcggctccttttccctggcctcgtctcctgagataatggcaaggccgggaaccccgttctttacgcctctctcatataactccttaagagccggtaaatcgttttcatcaaagcagagaaccatggatccattgcgcttgaaatcgaactgcaaatcgtttgaaagctgctccatcatctcattcccctgcacattcagcattgctttcagggaaccgttggccgcatcatatccggcatggacgatggcgctgttggctttggaagttccggagcatacgtcctcctcacgctccagcagacaggtgtggagatgatacctggataactctctggcaacggaacagcctgttacgccgccgccgattacaactacatcatagatacaactgctcattcttcttctctccttttacatttgttagaacggctggattccggcttccgccggtttttcaccgccaaacgacaaaaagagtaaggtaaactaagcgtcataaaacgcttgataccttactcttatctctcttaggcacttatttatttatgattattttaaccaatttacggatgattgtcaagatttaattgaggttagaagacgcgtccggaacggaccatgtccggtgtggtgaaggggctggctgagtcttccatccccgtgggaggttggtcgtggaagggggaagtaggcggaatgaattgctgcggggaccgtttgcactctttggagtgcgcatcagtgctaagctcgtgaggaacctcgctaagcgccggcggactcccatgtcccctctgcaattgattccgcctacttccccgggtcaggttttcgccggggacggaagactcatatacacaccccgccaccccgtccgctggccgtaccggcggcgtccttacctgcctaactaaattctgtatgtaatttatttcttctgacggtacacatgccccagccacatggatgcgcctacaaatacgcctcccaggatattaccgatggtgaccggtatcaaattcttaataagaaaattgccccaggtcagcatggacaggtcaagtcctgcttctgccgctttggccgcataagccggcacatgggatgcaaaaattcctgccggaatgtaatacatgtttgcaactgaatgctcaaaaccgcagattacaaaagaagcgatggggagaaatgttccaacgattcttcctgttacatcttttgcttccagactgcataaaacagcgaagcagacaagtacattgcagaagaatcccagcactatggcattgcccatcggcagggacgctttggtggctgccagcttcatcgtaaataccgccaggcctccgccggaataattcatctgtccgaagtacgcgcagcctgccgccacgatgatacttccaatgaaattccctatataaacaaacagccagtttttaagcatcattcctgttgtcgtctctttttccagaaccgagatgctgatgaggcagttcccagtgaacagttcccctcccatcaggataaccagcgataaaccggccggaaacaaaagaccgcagataatacgggctgtggaaacgtccgcaatggtgtgagccgccgtattggtcaccgccgctcccagagcaatgaacatacctgccagtatccccaaaaccagcattctgaacaccgatagctctgtttttttcttcccggcggccgcataatttttgataacctccggagctgtgaacagattcataatattcctcccctgatttaacgataacctgcacgctccgcgcacaggactccgcctttaataaaacgatgaaaggcacgctttgcgaacctttcaccgtttatcaatgacacgtagaaaattttagaacagaccggaaatctttcctgtcgcatctacatcgatcttctctgctgccggaacttttggaaggcccggaagagtcatgatgtcgcctgtgagagctacgatgaagcctgcacctgcagataccttcaggttacgtactgtaatcttgaagcctcttggtgcgcctgtcagtttctggtcgtcggagaagctgaactgtgtcttagccatacagattggcaggttgccgaatccaagctctgtcagtctctttgcctgtttctttgcagttgcagccagctctacgccttcgcctctgtaaatctttgttacgattgtatttaatttctcttcgatggagaggttctcatcgtagcagaactggaagttattctctgtctcgcacagacgaactacttctttagccagctctacgccgccgtcgccgcctttgccccatacttcagaaagagcaacgtttacgcccagttccttgcacttgtcagcgataagctgtaattctgcctcggaatcgaatgggaaacggttgatagcaactacgcatggaaggccaaatacggttgtgatgttctcaacgtgctgtaacaggtttggaagacccttctcaagcgcttccaggttctcgttattgagttctgtctttgcaacgccgccgtgatgtttcagggcacgtaccgtagcaactactacaactgcggatggtttaaggcctgctttacggcacttgatgtcaaggaatttctctgcgccaaggtcagcgccgaagcctccctctgttacggtgtaatcgccaagcttcagagccatcttagtagcgataacggagttacagccatgagcgatgttagcgaatggtccgccgtggatgaatgcaggcgtatgctccagagtctgaaccaggtttggtttcagggcatcctttaacagtgcggccatagcgccgtctgcctttaagtctgctgccgttacaggctcatcgtcgtatgtataagctacgatcattttgcccagacgctcttttaagtcaatgatgtcgcttgccaggcagagaacagccataacttcacttgctaccgtgatatcatatccgtcttcgcgtgtgaagccgtctacttttcttccaagtccgtcaacgatgtttcttaactgacggtcgttcatgtcaactacacgtttccatgtgattctcttcgggtcgattctcagtgcattgccctggtagatgtggttgtcaagcatagctgccatcaggttgttagctgctccgattgcgtggaagtcgcctgtgaagtgaaggttgatgtcttccatcggaactacctgtgcatatccgccgcctgctgctccgcccttaacgccgaataccggtcccagggacggctcacgcagagctactgttacgttcttgccgattttctttaatccgtctgcaagaccaacggttgtcgttgtctttccttcacctgccggtgttggtgtgatagctgtaacaaggatcagttttccgtcttccttgtcggtttcttttaacaggttgtagtcaacttttgctttgtagttgccgtactgctctaagtatttctcgtcaatgcctgctgccgctgcgatttcacggatgtttaatggtgttgattcctgtgcaatttcgatatctgttttcatgatatattcccctccatcgatttgatttatttggattgttattatttactgagtaattaatataactggtcagaaagctcagatgcctttaaaatcttctgctcataagcaattgcctgctcttcaagactttttacttttgcggataaatcggctacaaatgcctcatccttgatggaacccagattgattttaacgttgaataaagcgccgattactgcagtacgtgccatcatggctgccacaagaccgtctgttacggcattggtgttgcctctgcttactactgcctcagcgattgggaaaatcttgtatgcagtctcagctacggaaagcggaacctgagcggctgcttttaaaccgttctgcattgcttctcttctggctgctttctcttcgtcggtgtctttcggcattccgatagcatccatgtaaagattgaatgatgtgctgtctttctggatatcttcaacaagctcttttctgagtgccgcacctgatgctgcaagctctttcatctcgccttctacttctgcgtatttagctttgcctaccgtcaggttcgctaccatctctgcaagtgctgccgcaagcgctcctgcaagtgcggatacgctgccgccgcccggcgccggtgcgtcagatgctgttacgtctacaaaaccctcgactgttaaatcttttaaatctcccattttggtatttctcctcgcatttattcttacttttgctgtgccgcccctgccttgcggccgggacggcgctatcattaaccgttcttaatttacgtttcagaattataacaattccgtcatgagctgagcggatattcgccgcagttcagccttcggccgtactgttacgattattcttcttccagtaagcggatttccataatctgcttgtcggcgtcaaatgtcatcggtccgaagcttgccagctgtaagtagtactcagcacagtcaacaagagcctgcatcggaacaaggcctactaactcgctctctaatacgttaactccgtaacgttttgcttccatcttgattaactcaaatgcacggtaaacagaagtctttgtgaagtctgtcaggttcatggaaacctgtgcaaggtttctgtcgtccagcatgattccgatcgcttttacataacggagtccaccgccgatgtgacggattctcttggcaatctggctggcaatttcaaggtttggtgtatccaggtttacgttgaatgctacaagcggcattcttgcgccgactgcgctgacacctgctgtcggatggattgtctcaggaccaaagtccggagcccacagttctttgtctttcatcttctcagccataccctcgaactgtcccttacggatttttgcaaggttctctctgtgaggagctgatgcagatgcttcatataagaagcaaggtacgccgtatttctcaccaacgattttagctacttctttggctactgcgtctgcctcttctactgttgtgttacggcaaggaataaatggaactacgtcaacggctcccattctcgggtgctgtccttcatgtttggtcatatcaatcaactcaactgcttttccgaaggatgcaactactgcgtcgcgcagttcatccggctcaccgataacagttacaacacatctgttgtggttcgggtctgtctggtaatctaagagcttaactccctttttacctctgaagcagtcaacgatctgctccactttctgcatgtcacggccctcgctgtaattcggtacgcactcaatcagtttgtttcccatgataatgatcctcctctgttttatagtgataaataataatgtgatagtgatatatatattggtgatatatattgcagtaattaagtaaatctattataacatttcccgctgccgtcagataggccgcaaaaaattattatcttgaattattacgttttaatgcattactggtaatgaacagccgacacaaccgctgccacaaccgtctctgccgaacatgaccagcccgctttgtcgaatctgccggtcagcttcagggtatctccgtcctccaggcgataattctcaccgttgtccagtgtcacggccagcgtgcctttataacagtatatcataacggcttcatattccggcatctcaaatgtcaggatactgcggatatcgcagccctcgccttcttccattctaagcggaacgacatggccggtacatctgccttttctaagcatcaggttaaaatcgattacctttcccttgcttgccgtctcgtcacctccgtcaaaagcatgcggcgtgaactccggcagatcgatccagttatcgttattatgagaaaggctgatatcgcctttcagagtcatgataatgcggtcgtaatcaggcaggctcgtaaaatcgctctcctccagttccaccgtagctgaactcagtctccacataaagtccctgtccgcgtaaacactgccctccggcgcaatggaaagctccgtcgtcaatcctccgctccactccgttgttttgtaatcttttttgtgtaacaattcgacatggtaatctgccatagcctttcccctctcttaacctctgttttcgttactgttcgcagctctgccgaaaagcgaagttctgtggacagtaacctgttttaccctcttctctctgactttctctgttcctctatctttgtaaatacgtgcatcatcatcaatgatgcaaggcgcactgtcgctcccgacggatcatacagggggtcaacttccaccaagtcggccgccacaatccttcccatctttgcgatgccgttaatgatatcgcattcctgatcgaaaagaaggccgcccggcagcggtgacgccactcccggcgctatcgacatgtcaaatccgtcaatatctatggtaaggtaataattcttagctttcggtatctttgccagaataccgtcgacgccaatctctgccgcctccctggctgaaataagaacgctgccgtagtttctggcatcgtcgaaatccgtccgcttgctgctgcccattcccctgaggccaatctgcgccatcggaccgatatgcttcatctcagacatccgccgcatcgggcttccgttgcctgttttcagcggaccgacatggtcggtccagtcaaggtgggcgtcaaactgcactacgcatatctcctcccctacttcttccagggcttttcccaccggaatggagatggagtggtcgcctccgattacaaaaggcacagctcccttttgaataatctttttaacgctctccgtaacattgttaaatgtataattaaaatcgctatgtaaaatgtcaacgtctccgcagtctgcgatgctaaaaggcgctgccagcctctgcacgtcgttttcaaaatcataatatccaccggtgccgcggccatactgtgtggatgcttctctgattctgcggggagccagcctcgcgccgctcataaatccaacgccgaaatcacagggaacacctaatactgctatatccgcatcaagtttgtcaaggtctgtgcaaatcggatatttaccaaaagagcagatacctgttataggtaaatttaacggttccatgaaacatcactcctttttatattgtacgataattttaccaatactacacagttgttgtaaatatctttcgctttgcaaagtaattcattcactaaaattcttatctcaattatgcctaaccgctttacagaaagtctttacttagcatattttatcatgtataatgagattttaggggaactatttacagaaaggggaaggcggcatggataataccgatattaagatcataaatatccttcaggagaactgcaaaacttcaacccgggaaatcggacaaaaagtagggctgaccgctccggctgttgccgaaagaattaaccgtttgaaagatgcaggggtcatcgaaggatttcacgcccagattaatgaaactctgttaggaagcaacatttcagcttatgcgctggtgaatgtacctccgaaggaatatgaaccgttctgcagattttgtgaaaatgatccttcaatcgttgaacatcaccatatagttggtttaaacaatgttttaattaaaatgcgcgttggcaatgcacaggatctggaggttcttctggaacaaatccgcaagtacggactgtccaatacttccatcctgctctccacctacttccggcagaaggagtttactccgttaagcggaaacaggatggattgatgttttatcatactttggcaaattaaatgccacagctgccgtgatatgattatccggtaactgtggcattttttaattgtaatttaaaccaatgtcagctcggtggaatgatctcccatcattaatccaggaacgtcaccgctttacacggagtccggtagttggacggtgaaattgtaatacccgtagcaggagtactggaatggatcacctgtcctccgcctatgtacatggcaacgtgattgatatagttgccgctggcatagaacagcagatctcccggctgtgcgctgctgaccgatatctcgcgtccctttgccgcctgatccctggaactgcgccccgttgtaatgccgaaatgggcataaacgccctgtgtaaatccggagcagtccgcaccgtttgtcaggctggttcctccatatacatacggatttcccaggaactgtttggcataagccactacggctgagcgtgtggccgaaaccacttcgctggaaccgcctcccggtccgttcgaacctgggcttccgcctcccggccctttattgcccgacgacgccttcgtggtctcgggcgcttttgtggtttcaggagcctttgtcggttcaggagccttcgtcgtactgttcgggttggcctctatcgtaccagtataagctgtctccggagctttcgtggcggccggagccttggtcgtctgtttaggggcctcggccgtctgctttgcagcttcctttttggcctcttccatcttctttatcgcgtcttccgcttcttttttcagttttgccgcttccgctgccttctgctgctcttcctgtgttgaaacggccttattgaattcaaccctgacatcgatgtaatccttgaatacataaccgaccagatcgttgtccacggatattttcgcaaaatctccctcttctccgattaccacatactcggcatcaggtgaaagcaggtccagtgtacggctgtccaggctgggcttctcgcgcagcctcagagttgacgtgctggcgacgcgggccatcggtgtgcccacctgtcttgcaatcgactcagcttccgctcctgttataaaatactgagcttttatatagccctttacatttcccgactgaatctggtaccactttccgccctccccgtccacagtggaaaggatcgtggcggcacagttgttgtaaatctttcccacaacggcgcttgtggtattggcctccgaccttacattgacataattgcttacacgggaaatggccacattatcatatgccgattttcctgcggctttaacgaccggcacctccccggcccgttccgatgtggcggcgcgggccagcatctcctcggaagaaaatgcctgagccagctcctcctccgggttcaggctgcctgcataataattattgatagccaccgacgcacctgccaccggtgaatctgtctccagattcattgcggcttccgatgaaaacggaccgcctcctgcaatcaacaggaaggcagacgacatcatcagtatcttcaaaccctttctcatgtgaaacttccccctaaatcctggtgagataactctgtgcgcttgtaatgcagtttgctccgtcggcagccgctgtaataatctgcctcagcgccttcgttctgacgtccccggctgcaaacactccgtctaccgaagtccgtccgtcctcgccggctataatatatccctggttatctgtctcaacctgtccggcatactgtccgctgtccggttcgattcctacggcaacgaatacgccgtccaccttcagttcactcttttcaccggtctttttattattcagctttaatgcctctactttatccgaacctacaatttcttcaaccacagtatcccagataacttctacattatcgagggacatcaggcggttctgcaggctcttcgcgcctctcagttcatccctcctgtggatcaggtaaaccttgctgcacattctggccaaaaatatggcatcctctattgccacatcgcctccgccgattaccgcggttgttttccccttgaaaaatgctccgtcacacgttgcacagtaggaaaccccggccccggtcagaatctcctcgcctttggctccgagctttctgtggtgggctcccgtcgctatgattaccgccctggccagataagtgtcgttctcacaaactatcttcttaacctcgccgcccagttctgcggccgtaacagtgtcttcctcaaattcagctcccagcttgtctgcatgctccctcagcttcattccaagatcaaaacccgagattcccggaagtccgggatagttatccacttcatacgtgttgagaatttgtcccccgctcatcatgtttctctcgatcaccaccgtatcaagctccgcccgctgcgcgtaaacggccgcgcttaagccggccgggccggaaccgataatgatcagatcatgtatcttgtccatctggctgtcctccaatcattctaatctgttcttgtcctaaatttatcatcacgtatactgctgtattatcatttgtcatcaccatgcggatccatggcttttgagcttacttttaagtataccacatctttccagcgtggaacagatattttagatggaaacttcttacatttttatattttgttacttttcacacccttgttaaaaagcggcaatgctgtaaaaaataacaagcgggacattaccgtgtaaaaagtaactatattttttcaaatgtttcctgtcctgctgaaaaattcgttttccatgacattttctccaatccgtgataaaatataaatatcctgataatctgcctgtcccggtaaaaatggattacggcgacgtgcgggaagctcccgcggttcaggatataaagtaaactgactttcaaaggagttgatttttatgccaagaaaaacagtacttgtcacaggcgcttcccggggaatcggtaaggccattgcgataaaatatgccaaaaagggctacaacgtaattatcacctgtgtccaccggcgcgaccagcttctgctgactgaggtggaaattgaaaactataatgtagaatgtatgacatgggtcggggatgccggcgattacaattcctgtgaggaactgttcaaacagatcaaaaaacagttcggcggcctggatgtcctcgtaaacaacgcagggatttcctacatcggactgctccaggatatgaagccggaggactgggaactcatgatccggacgaatctcacttcggtatttaactgctgccgtctggctgttccaatgatgctccagaaacagcagggaaagatagtcaatatctcttccgtatggggaataagcggcgcatcctgtgaagtggcttattccgccaccaagggaggagtcaatgcctttaccaaggcgctcgccaaggaactggctcccagcaatatccaggtcaatgccatcgcctgcggcgccatcgacacggagatgaaccacttcctgcaccgggaagacttaatcgggctgatggaagacattccggcgggacgactgggtaaggcggaggaagtagctgatctggcttaccatctgggatataaggaatcttatctgaccggacagattattgggctggacggtggatggatctaagtcttatccatatctcttccggcttatgcagttcagtatcaatgagaatttccaattcagtaaaaaagagagaaggcaccgggcattctgccccgttctttctctctctttttcaccgtctcttccgtttactttagagccgtcagccgagcgagacgaatctcaaattctcgcagggattcccgatggtcgcccatgcctcactgtcctccaatacaaacatgctggtggaaaccgtcttcgccggtacgccgtcgtgcggatggcggcagatacagttttgtccgttctcatggtccgacatgatacggaataaatcctggaaccgcagctttccataacgctccccgaccagttctccgattctctcatatcttttataggtggatgtatactgggtgatgtccggatttaagtgtttcagcttatccgaaacataatggttcgcacggtacagcacaccgctgccgtcatcctcctgtacggccacatcgtctttggtcatctcgacacaataagcatccttcgtatctacgattatcacattcagcccgttcatcctgggagattttttgacatactctaaagcttcctttgccgtcttacattccgaaagtagaagatgggcattcaaaaatatatgggccgcatcgacacgctccacatccgatggcgcttttaccgaccagaaacctgtatttgtaacgccaaggccgtagctgttcatcccgcatgccggataagtcacggttccggccccattaatttccaccatcttaaggccgttcggatactcccttttgatcaccgcctgttcaatatacatgctcatatccctgtttttgattacataagtgttgccgtccacagtggccttgccgcggaccatcagcatgctgcactcctgattaaagtattcgctcataaaatacgccggaatattaagataaataatatcctcaaaggaaattccggaaccatccgagatacccatctcatatctcatagagatcctgatgacagcgctccataaaaccaaggttgcgctccacaaatttccggtaccggtcattattcagagaatccctctccatccgctccctgacgagagccacgtttttttcgatgatctctcttaattcttttccttcctggacgccctgctcatatggcgtaccggatacactaatcactgttttcatttaatttccccttcctctatctaaactatttgatttacagttcctccgacctttgtacatcggcagtaatgtccatcccccaccagcatacggggaggaggagccagccggcagctctcatccgccatagagcatctcgtacagaagctgcatccctttggacggttaatggggcttggaagctccccgtgcaggacaatccggttcttttcaacccccggtcttggtaccggcacggccgataataacgcctttgtatatggatgcgtgggccttttaaacagctcttccttcggggccgtctcaaccacctcgcccagatacataaccgccacctgggtcgatatatgctgtacgattctcagatcgtgtgagatgaacacaagggcgattcccagttccttctgcagcttcaccagcagattgataatttgtgcctgaattgatacgtcaagcgcggagacgcattcatcgcagaccagcatatcagggctcaccgccagggccctagcgatacagatgcgctgccgctgtcctccggaaaactcatgaggatattttttaaggctgtcactgccaagaccaaccagttccaaaagctcagccgccttcttctttgcttctttttccgaacacagcctatggataacaaacggctcgcttaaaatacttccgaccctcattctgggattcagcgaggcatagggatcctgaaacaccatctgcatatgcagtctggttcttctcatctcttcctccgacagcttcatcagatcccggcctttaaaaatcacctgcccctccgtagcttcaatcagcctcagtatcaatctggcaaaggtggatttaccgcatcccgactcgcccacgatccccagtgtttcccctttctttatgatgagattaacgtcgtccacggccttgacgaactttttctctttccccagtccgccggagaccgggaaccacttccttaaatttcttacttccattaaaatatcgttatccgtcttcatctgcaactcacccccattcatttgtatacttcagacaggctacggttctgttacccagagttatttcctccggtttctttttcccacagcacggacgggcatacctgcagcggttcctgaacgcgcagccttcggggagagcataaatgctgggcacatttccttcaattgtttccaacggttttccgctgtcttccatggttggaatagagcccaaaagcccctccgtgtaaggatgtttcggtgattcaaaaagctctttgaccggagccttctcgacaatgctgccagcgtacatgaccgccacattgtcggccatctctgcaatcacacccaaatcatgagtaatcatgataattgatgtcccaaaggtctggttcagatgattcagcaagtccagaatctgggcctgaatcgttacatcgagcgcagtggttggttcatccgcaatcaggatttgcggatggcaaagtaatgacattgcaatcataatcctttgacgcattccccctgacatctcaaagggatattgcttcagcctcgcctccggggacgggatctccaccgtcttcagcatctgaagcacccgttcccgggcctccttttttccgattttttcatgccgggacagaatctccatcatctggttctctatggtatataagggattcagacttaccatcggctcctggaagatcatcgatatacggtttccccggtatgaagacatcttcccttccggcagttccagcaggtttataccctcaaacatgatttttccggaaatctgggccggcggggaagacaggagcctgataatgcttttggacgtaacgctcttacccgatccggactctcctacaagccccagtttttcccccttcttcagcgaaaagctcacatcatttaccgcagaggcttctccatatttggtgtggaacactacgtttaaatgttcaacttttaaaatcggttcactcactttgtttcctcctctcacggttacacattcagcttcggatccaggtaatctctcagccagtcgcccatcagattaacgccgagaactgtcacagtgattgcaattcccggaaggattgcaagccagggatttgtcagcatatagtcgcggccgtccgacagcattcttccccatgtcggaatttcgaggggaacgccaagtcccagatagctcagggacgcctccattagtatgatccgggccattcccagcgtcgcctgaactatcactggactgataacattgggaatgatatggtaaaggataatacgcccgttcttccctcccacggagcgtattgcctcaatatattccatctcacggactgagagaatctcacccctgatcagcctcgcatactgtacccagttgctgatggctgcgattaaaataatattcctcagactacgtcccaggacggcggcaacaaacagggccaaaagtacgaatgggaatgaaagctggatatccacaatacgcataatcacggagtccacccatttcccgtaataaccggccaaagctcccagcgtgatcccaaggattcctgcacagatggttcctgagaatgcaaccagaattgtaaccctgctgccgtaaatgattctggacaggatatcgcgccccagctgatccgtacccagaagatgctttgttgtacctcctgcaaatacaggattcatcagtttattaaccaaatcctgttttgcaggatcataaggcacaatcagagtggcagtaaccgccgtaataaatacgaccaaaacaataattacgccaatcagccctgttttgctgtcttttaagcttttccacataactgtttcctcctcactgtaaacggattctcggattaatgacgcagtagaggacatccacaataaagtttacgacgacaaaggtaactgccatcaagatgacgatgacctctaccaccataaaatcactgttattgatggactgtaccagaagccgtccaatccccggccacgaaaataccgtttccgttatcacggagcctcccaataatcctgcaatctgcaggccgactacggtcaggacggaactgagagcatttttaaaggcgtgcttcattaccaccgcaaaattcttcagtccctttgcttttgccacgtctatgtattccttgctcataatctcgatcatgttggaacgcagcattcttgtaatcgtcgcagccgtgaatactcccagtgtaaacgccggcataaaaagtgcgctccaggagtcaaatccggatgtcgggagcagtttgagtttgactgaaaaaaggagcatcatcataattcccagccagaatgcaggtacacactgtcccagaagagccagggaacggatcaccgtatccagaaccgtatttctttttacagcggagataattcccgcgggaatgccaatcaaaagagaaattcccatggctgccaaagccagcgtaacggtggccggtaccctctccagaactatctgcaaagccggtacaccgtagttataggacatcccaaaatctccatgtaacgcatttcccaggaacctgaaatattgaacaaaaatgggatcattgtatcccatcttctcccgcatcgctgcaatttcctcaaaggatgcagtctccggcagcataagagccaccggatcgccggcgatatttaatacaagaaaaacaattatcgtgataccaagtattgcaatcagcgactgcagaagccgcttgcccagatattttgccatatgccccttgccctttcatttttgaaaaggattctgcaaaatgtttctcatctcgcagaatcctcccaaattttatttttttgcttatctatcacagatatttatcacacctgtttatttgtcaatttttgcattatttagtatcagcatctcatctgccctgggaatccattggctgattttatctttattgtacgcataaatcgcatgcgtctgatacagcggaactaccggggcgtgatccacaaggtattgctggattgcggtataagcctcctggctgacagccggatctacggcagtatcgatatcatgcacaagtttatcgtattccggatcgctccaggctgaatatctttcccctgttcccagtacacatttcatgatcagatttatgttattgtaagggcctccgaaactgtaaaacgtcagcggcgaggttgtctttgcctcatattcatccttgatcgtattgctgtccttttccactatcacggtctttattcccacttctgccagctgggctcccacagcctgtgcgatatcggctgcattgcttagtcctgagaaagaaccctccatttccacctcgaagccgtccgggtagcctgcttcagcgaggagcgcttttgctgcctccggatcgtattcatatcccctgaccgactcatcatagccctcaaacatcgggagcgccagtgaattacagggctgtccatagccgtccagcacgccctgtaccagggtatccttatctatcgccatgttgatggcctgccgtacttttaaatccgtcaccggactgtcaccgaagctgttcattgtataatagacggtacgggtagtcggtttggacaccacctctatattgccaaggctgttcagacgcgaaatctggctggtggttacggcgctgattaaattaacctcccctgcctccagggctgcaatcctggccgacgcctccggaatcaccttgcatatcagctcgtcggctgccggtttcgttccaaaatagtcggaaaacgcttccagtttaattgatgcatctttattccactcaaccatcctgtaagggcctgagcctatcggtttggcattaaattcgctgtctccaacctgttccacgtaatgctttggaataatctttatgtaatttaaacggagcagtgtggaggcgttcggctcatctgtcttgatatacatggtataatcgtcgatgggctcacagtacataaaagaaaaatcactttttaatttatagtcagctccttccgcgcgaatggtatccatcgtatacttcacatcttcgctcgtcatctccacgccgtcgtgaaatttaattcccttttttaatgtgaatttataagtgcagtcgtcgattagctcatacgactcagccgcatcacatacgatattataatcttcgtcggtagtcaccagagcgctgaaaatctgggccatcatggctgccgtgattgtagatgtcgcatttctgggatccaggctgtccacatcctttgtctgtgcataggtgagcgtaatcctgtcctcctgccctgcgcttttgccttcttctccctgtttagcgccggtctcagaagctgccggtttttcggaagaaccaggcgtcgcacagcctgcgagagtaccggccgtcattgtaaataccagcaataatgccatcaattttttcttcataggtatattcctcctcttctatctactcttaaaatcccaaacaaatttcagaatagttactataaatatacaaattattgcacattttgtctaacagctttcctctgacaagctgacaggcgtttgcctgtcataaactgctgctgcgaatcggcatttcttgatattccatatttgcttctcaaccggcctggtggtatactatagcttattaatgagacattttatcgccacaataaatttcgcttattagaagggggccatctttttgattaactttcttaacctacaatactttttagtgctttccgaagaaatgaatttcagaaaagcagcggacaagctatatatcacacagcagtcattaagtggccacatcatgaagctggaagactttttcggagtgcctctgttcaacagaggcacccccctgacgcttactcccgccggttttcatctgaagaaacgggccgcagagctggttgccatccaaagcgatctgcagcaggagctggtggacatcagcggttttatcggcggctcccttaccgttggaagcactcatgtccgggcgcaggttcttctgccttccatcatcaacacattccaccggcagtacccgtctgtcaagctcaaactgttcgagggtaatacgaccgaagtggaggatgcgctcaaaaacggccagttggacgtcagcatcggttttctgccgacagacacccagaggattacaagcatccccctttacggcgaaagttttgtaatcgttgttcccgatgttcttttggcggagtatttccccaatgacgataccatacacggttcttccctctcctatgagcagggactcatgtgtctggaaaagcttccctttatttcaataaccaatgatacgaagataggaaatttctgcgaaaagttcttccggaaaatcggaatcacgccaaatatattccttgaaacgatcaatgtcggaacgctgctgtccatgtgctccgaagggctgggagccatcgtctgtcccatgacgtttatccgctattcctactatgatttttcacaccataaaatctgtgttatcgaggataaactcagtcaaaggccgatcgtggtaaattatctttcgaaaaaatatcaatcaaaaaccctgatggcatttatcagcactgtccggatgatgctggggaacaggagatataggagattatcccctgatttgtatggaaatttctcccatattgtattttgtcagggactcgtacccctcctccgtgatcaggactgtgtcggagtggcgcacgccgccccatcccttatccataaggcccggttccaccgttatcaccataccgggctttagggcaattttattccccattgccagtgacggaaactcatgggcggaacagccgatgccatgccccacccgtccgggcaggatatcaccaaaaccataatctgtataaacctgtgccgctgcccggtacaaatcttcaaaggcagttcccggacgaaggatattaaagatactttctcttgctcttaacattccgtcataagctctgcgtttatagctgtccagctctccgattatgatggttctctcattctcagcatggtagccgccggtctttgcccaggccataggaagtgtcaaatcaccattttggggatgataatgctttgggcaatcgcagccgtaagcaatatgtccgtttgacaggcaccagacatgcagactgtcaatcatgcctccctctgatgttccaaaaccgcatacctccatatccggaaacttttcatgccatagctttctcattgcatactgcccctctgtagctgcttcggcctcagagcatccccgttccaacgcatgaatggcagtctcaacccctctgtcaacaagccgtgctgactttcggatacagcttatctcatattcatctttaataattttcatcatattaaccagcccggaaacagagacaattttatcaggatgaagtacctcctgaatctcctggtagaaatccatgctgatatcatcaagctccatccccaaacacagcttctcttttccaaccagcaatcggatggcatctgccgctttacccgccagaggaacattggctccccatttcccatacagctctacccgtttcagagccccttcctcttttgcatgagcgcagcggatggaatgcaccagaagacagggttcagcatcaagagtcactacaacaaaagccggatggctatttaataccggattaaagttactaaaataaaaggccgtctccggtttccggataattaccgcgtcaatcccattcgccgacattttttctttcagccggctgattctcatttccacgtaaacacttttctccaatgcataatccacagtaccttctcttttgatcataacatcctccttgcggttcctattcttatcctttgatacggccattatactattgggttttcttaatttccaaaagttattcagcacaaagggtaacaggcaaatggctgttgctgccgcttttcaggatcttatggtacaaaaaaagcaccgcaaaacctgttttcacatctgttttgcggtgctttatccggccggcctcagggccgccctatattaaattataattctgttacagaagattagttatcttttgcagcagccttagcttctttaatcttctctgtcagcataggcacaaccttgttcagatcgcctacaacgccgtaatcagctacgtcgaagataggagctgtctcatctttgttaattgcaacgatgatatcagactcttccatacctgccagatgctgaattgctccggagataccgattgcaaagtaaacgttaggacgaactgtcttaccagtctggcctacctgtaaatcttttggcttccagcctgcatctacaacagcacgggagcagcttactgttccgccgattgcttctgccagttcttcaagaatcttgaagttatccggaccgcccattccacggccgccggatacgaggatcttagcgtccatgatatctacagtgtcagttacagccttaacgatgtcaaggatctctacatactggctgtttggtgtaaatcctgggttgaactcttcgattacagctttagcgcctttaaccttcggagctttcttcataacgcctggacgtacggtagccatctgaggacggaattccgggcaggcgatggtagcgattgtgttaccgccgaatgcaggacgtgtcatcagtaactggttatgtttcgtctccttgcccggaatcggattgattgggaaatctccgatatcgagctgcgtacagtctgccgttaagcctgtatggattcttgcgcaaacacgcggtccaagatcacggccgattgccgtggcaccaatcaggaagatctccggtttgtatttctcgataacagatgcaagagcatgtgtgtaaggctctgttctgtactcttttaattcgggatcatcaacgacgataaccttgtctgcaccgtattccgccagtttatccgcaaggccctttacatcggaaccgactaagacagccgttacctctgtgtttaagtcttttgctaaatcttttcctttgccaatcagctcgaatgcgataccgccgattacgttatcaacctgctgtgcaaagacaaatactcccttatatgcttctaagttcatcttattcaccactcttttctctgatttttaaattacgtgttttgctgccaatttgcttacgatataatctgcggaagcagccggatctaagttaacctgctcgccggcgccctttctgactttatcggaagccctggcgatctgagttggagaaccttttaaacctaagttggaatcttctacatctatcaggtcttttcttccccatacggtgatttcttttgcgtaagcatcgaagattccgcccggagtcatgtaacgcggctcatttaactctgcaagagctgtcagtaaacatggtaactgagccttaactacatgatatctgtcgtcatactgacgctcaacaacgatatatttgtcttcgagattaatttctctgattttctgtgcatagcttattaccgggattccaaggtgctcggagatctgcggaccaacctgtgccgtatcaccatcgatagcctgacggccggagatgattaagtcatactctaaattgcggatagcgcctgccagtgtctgggatgttgcccatgtatctgcgccgcctaatactctgtctgttactaatacgccattgtctgcgcccatagccatagcctcacgaagaacttcttcagccttcggaagacccatggtaactacggtaacctctgcgccatactgatctttcaaacgaagagcagcttccagaccagctttgtcgtctgggttcataattgtaagcattgcgcctctatcaagagtaccatcaggattaaatttaactccgcctttggtatccggaacctgtttaatacaaactactattttcacggtatgttcactccttattcatgttttttctcactaattgagatactttacaatctattgccaggaaatcttattttaacagggaagcggaaataaccattctctgaacttcagatgttccttcgtagatctctgtaatcttagcatcacgcatcatacgctctacatcgtactctcttgtgtagccgtaaccgccgtgaagctgaacagccttggttgtaacttccatagcaacctctgctgcgtataatttagccatagctgcttctacagaataaaccttctgtgtcttcttagccatagctgctctgtaaacaaggagctgagccgctttaacttttgtagccatatcagcaagctggaactgtgtattctggaactgtccgattgtacgtccgaactgttttctttcctgaacgtactcaacggttctttcaagcgctccttctgcaaggccgagagcctgtgcagcgataccgatacgtccgccatccagagtatgcatagcgataccaaagcctttaccctgctgtcctaagatgttctccttcgggattctgcagtctgtaaaaataagctcgtaagttgctgaaccacggatacccatcttcttctcttttgttccgaaggtgaatcccggcgttcctttttctacgataaatgcagagatttcttttttctttctgcctcttgcatcttctttaatgcctgttacggcgatgattacgtagacatcagcttctttaccgttcgtgatgaagattttggaaccgttgagtacccactcgtctccgtctaaaactgccttcgtctgctgtccctgtgcatctgtaccggctcccggctctgttaagccgaaagcgcctaatttctcaccttttgcaagtggaaccaggaatttctgtttctgctcttccgtaccgtaagtctggattgggtcacagcaaagagaggtgtgtgcggatacgataacgcctgtagtaccacaaacctttgaaagctcctctacgcacatagcgtatgttaacgggtcacagccctggccgccgtactccttcggaaccggaattcccataaagccaagcttctgcatcttctcaactgtgcctgtcgggaaatgttctgtctcgtcaacttcctgtgctaaaggttttacttctgtttcggcgaagtcgtggaacaacttcctcgccatttcatgctctttacttaatgtaaaatccatgtctattcctccatcattttcttatatagcgcttaaaggcggctttggctcgcctgatgcggttcaaaaattaattgtacttatagaagccctcgccggatttctgtcctaacttgccgccgcgtaccatctttctaagcatctggtgcggacggtatttcggatctcctgactcagcctgtaatacttccatgatagccagtactacgtcaaggccgatcagatctcccagagccagcggtcccatcggatggcttgctcccagcttcatagctgtatcgatgccttctacagttgcctcgccctcagcataaatgccgatagcttcattgatcattggaatcaggattctgtttactacgaaacctgcagcttcctctacctgaaccggaatctttccaatttcttctgagattgcttttactttatcaacagcctctaccggtgtattcagtccggcgataacctcaaccagcttcataacaggagccggattgaagaagtgcatgcctactaccggtctgtcaattcctgcgccgattgccgtgatggacagggaagacgtatttgttgcgaagatacactccggtttgcagattgcagccagttctctgaaggtctgttttttgatttccatatcctcgattgctgcttcaactaccagatcacagtcggcacaaatagtcttgattcccgtatgtatcttgttgagaatcttgtccgctgtttctttatccattttacctcttgcaacacgcttctcaaatgcctttgcaattctcagcttgccgtttgcggcgaattcttcattaatatcacataaacatacttcgtagccttctacctgggcaaaagcctgagcaataccggaacccattgttcctgcaccaataataccaactttcatgacaaatcctcctgatttttcaaaatgcggataaccgggctgttcccggctcctgatccattattatttgtttttgaaattgtccactttccgtttctcgagaaaagcagtcatgccttctttctgatcttctgtctcgaagcagtcaccgaataccttttcctcaatgacaattgcctgatccatatcaacctgaagtccttcgttcatcgctttcttagaatttctcacagcaataggagcattcttcgcaatgcccgcagccagtttcttcgctgccggcatcagttcctcctgtgtgtaaaccgcattgacaagtcccagtctgtatgcctcatccgccttgatgtttctcgcgccgtaaaccatctcttttgcttttccaacgccaatcagacgggccagtctctgggtgccgccgaatcccggtgtgattcccaggccaacttccggctggccgaacatggcattgtcggaacagatacggatatcacagctcatggcaagctcattgccgccgccgagtgcaaaaccgtttaccgccgcaataaccggaatcgggaaagtctcgattttacggaaaatatcattgccgaatttgccaaatgcttctccctccgcctttgtcatcgtgctcatcgcagcgatatcggctccggccacaaaggatttctcccctgctcccgtcaggataatggttctgattctggaaagatccactgcatcaaaagcaacttcgatgtcctttaacacatccttgtttaacgcattgagcgcctggggacggttgatggtcataatgccaacgtatccatcctcctcgtaatcaacaaaccccattgccatcatctccttacatccatatgttgtaaaccagaaacagccggagcgtggagggggttgtcccccctccacaggttccggttattctaactgcttagtctctctcgacgattgtggcacatcccatgccgccgccgatacagagtgttgcaagaccttttttagcgtcacgtttctgcatctcgtataacaatgtagtaaggatacggcatccggaagctcctaccggatgaccaagggcaatagcaccgccgtttacattcaggatatcgctgttgaagttaaggtcccgggcaactgcgatagactgtgccgcaaacgcctcgttagcctcgattaagtcaaggtcttcaaccttcatgcctgttctcttgaaaagtttgttggtagctgctacagggccgatacccatgatagacgggtcaacgccgccaagtgcgcctgccacccatgtagccattggtgtaattcccagttcttttgctttttcttcgctcattacaacaactgctgctgcgccgtcgttgatagaggaagcattacctgccgtaacacgtccgccgtctggtttaaatgccggacgaagttttgcaagtgattcttttgttgtaccggcacgtgggccttcgtcggtatcaacaatgattgtttcttttttcttcttgacttcgatcggaacgatctcgtctttgaatctgccggcttcacgtgctgcgcaagccttctgctggctgctggctgcgaactcgtcaagctcttctcttgtgatgccccacttgtcgcagatgttctctgcggtgattcccatgtgatagccgttgaaagcatcccacagggcgtcatttaccatggtgtcgatcataggagcgttgttcatacggtagccgtaacgtgcgttcattaacgcatatggtgctgcggacatgttctctgcaccgcctgctactacaatatcagcgtcccctgcaataatcatctctgctgctgagtttacacactgtaaaccggagccacatacgacgttaagcgttacagccggaacttcaaccggaagtcctgctttgatggacatctgacgggccacgttctgaccaaggccggcctggattacacagcccatgtaaacgtggtctacctgctccggagctacgccagctctcttcagtgcttctttaataacgacagctcccatctctgctgccggcactgtgctgagctgaccgcccatggaaccgatggcggtacggcatgcacttgctattacgactttctttgacatatcaaatttcctccttaaaaatgacttgccacgtaaataaaacaattgcatagattgatagtaactatatcttagcactcttcaggagtcctgtcaaataattatcaaagaatttataaactttttattttgctcattttacctcaattttatagcctttatacataaaaatgtgaatattgtacattttttatatatttacggggctgataaagttaatcctttatgtccttttgacaaaacagaggctgcccttgttaattttcaggcaaacctctgtctatgttatttacgaacggttataagatgaataaaaaattcaaataagtcatttgggatgccgtatcagcagccccggatttcatttttaaaataatctacggcatcgacggccagttttgccagtccggtcgtatcggacagcagggcaaccatcgtatatcccctgtcatataacggtttcgcagcttttgcactggatgctatcgtggcaaggaactttccgcattctttggtcccctcttctatttcgcggattgccgcctggacctccggaaccgacgggtttgccatatatcccatggaggttgaaaggtccgccggaccgataaagattccatccactccttctacagatgcaatctccctgatattgcccactccttccggagtttcaatcgcaatcatcacaatcacatcctcattcgctctggcataataatcagcctttgaaagactgaagtttgtggctctctggctgcctgcgattccacggacaccctgcggcgcatatttgcagcattttacggcgtattcagcctcttttcttgtggaaacataaggtacatgaatgccgtaagcgcctgtatccagagcctgcttaatccaaaccatatcgttccacggcgtcctgacaaacggggcgcagcccgttccttttgtcgtctggattatatgtaccgtatcctgcagtgacaactgggaatgctccatatcaatgatcatcagatcaaatccggcctcagccataatctcggcattgacgtggctcgacccctgtgaccagcagccgcataccggctcatggtttttcagtttcttcattacagtattgtcaaaaaatgttttacccatatggatgtcctcctctaatataagtgatatgaaataaattatctattacgtttgctttccgctgtctcttcatttgtccggcctgataatcggaaattccggttccctgccgctgagaacgtcatctaccgcatgtgcacagcttaaggaaacggccgcgtttgcctcctttgtcagagcggcattgtgtgcggatgcaatataattcggcagttcaaacaacggaaacctggcatccggcggctcctgctcaaatacatcagagcccgcagctgcaatggttccttcttttagcgcttcatataaatcacgttcatcccagataggcccccttgccgcattgataataatggcagacggcttcatcagccgcatggcatcccggttaatcatatgctctgtctcggaagtaagcggtgtatggagactcaaaacgtcagcatttttcagcagctcatccagcgtgtccacaaagtgtatccattccggataaacgcttctgtccgcgtaccggtcaaatgccagcacttccattgaaaatccgtcatggactatctttgccgtctcaaacccgattgccccaatgccggctattccaaaggtttttcctctcagttccatccccggcaaagcattccttatggcaaaattccctctttttaattcctcataaatttgtgtaatatttctcgcacaggccagcatcagcgcagccgtatgctcggctacggatcgggtattgcatcctttggcaatcgttacataaatccccatatcttctgccgccttaaggtctatattgtcataacccactccataacgtgcaataaccttgagctttgttcctgctgcaatcacatcggccggataagcggcggtccgcgcgatcacggcatcggcaacggaaatttctttttttaacgtgtcacggtcaaagccgctccctatctgtatctcgtaccccttttctcttaaatactgttttccttcttcctgtatgtcctgaggaattaagactttatacataatttcacgtcctttcttcgttaataaattaattatcttttaaaacattgaacacataagcattaaatcccataacaaagcgggattagaaagactgctgcgaccgtagtaataatatttaacggcaggccaatttttacataatccataaacttataaccgcccaccatcgtctgcgttacacagggagttcctaccggcgtggcaaatgcacactggcaggcaatcaccactgcaattacaaaggtggtggggttcactcccataccattagccagggcaatcacgatgggaaacatcatggttcccgttgcaatattgctcattatattggtcaatataacactcagtacaatgatgatacccaatacgacaaagaccgtcgccttgtccccagaacgttgagtgtggtgtcagcgataagctggcccgcaccggatgtctccatccctttggcaaatccctgcgaacaggccagtactactatggtgttccaatcaatgccgtgaaatgcatccttaagccccacgcagcccgtcaatatcataagggttgctccgaccatggccaccactgcaatgttccagattcccgacacaaatcctgccacaaccagaatcatgataattgccgtcagccagaacttccgtttgtccaccggtttgctctccccctcctcctcattcgtgagttcaaccgggcatacatcctcaaatttcagcgatttcttttccagccagtatccaactgttgcgaaataaatgattactatcagacacagcgggatccctgcctttgccagcgtaaaatagtgcatgggcgtacaccccggcgttgtttccaagatggtttgggcagcaacctgcggggtagaacctgaaagggtgcaaaagccgcctgccgcagaacccattccaaccgccatcagcactcttttattagtacatcttcccctgatttcgaaaccacggaagcgaccagcggaatcatcatggccacaactgccgaattcgaaaagaatgctgacagaaaaacggcaaagcctgtcatgaccgtcaccagcagacgttcgtttttgcccaaacctatttttgtaatcttattacccatggcctgcgcaacgccgttatcgaaacaggcatttccgcaaatcatcatggctgccaccattacagccgcctgagaaccgaaatccgaatatgctttactgtaatcagtaatcccaaatatggccattgccagtgacgccaatatggctgtcagcgcaaccggaattttctccagcgcaaatgagacaatggcgagcaatacaataataatagctaacgtactctgctccataaactaccctcctgattcgttaatttttttgcaggaagcgcgtatcttgctctgtttctctcctgttgacttcccctcccctttccgtatttttcttcacatactgctccctgattgtaaatctgtaaccccattcacctgcagtatagagcaagctgcgtaccaacttttcatcatcctctgttccaaacgtatccctgcgtccgtccactgctaaaaaaagagctgacaagtctgtatttatcagactttgtcagccgctttctactttttcccatggttacgcatttcaatactttttgctctttgccggaagtatgtcccaacatacattctaaacgtctcaaaaatgtttctaatttgttttccagatgttttaaatttgtttcatattaaataaaatgatactttttcattttccgccaaagcgtcgaacggctcatgccaagagctttggccgttttctggcggttataggaatagtaatccagagcttccctgatccgggctgtttcttccggctcccttaaatgagctgccgctgccatttttgcccccgcattatttacctcacccctgtcttccaagtttacctcacctggcgcctgttccccggccggagcaccgtccgtccattcttcctggttcagcacactgtatatttcttttgctcctatctcgtcagtgtcgctgtttacaatcaaccgcatgcagatattattcaactggcggatgttccccttccattctattctttccagcaattcaccggcttctttcgtaagcctgatgtcgcccagccgcttacagtacatctcctttttccggtttaataaatattcggccaaaatgccgatatcatggcctctttcattcaatgtcggaagcttcagatgcagaacgtccagccggtaatacagatccagccggaatttattctccctcacatactgattcagatcccggttcgttgcggccacaatgcgtatatcgacaaggatcattttattatcaccaatcctcatcacctctctctcctgaatcacacgcagaagtttcgcctgcagctccagagaaacctctccaatttcgtccagaaatattgttccggtatgtgcctgttcaaacagaccttctttaccgcctttctgtgcaccggtaaaggcgccgtccacatatccgaataattcactctcaagcagattttggctgagcgcggcacaattgatggccacaaaaggcccctttttccggtcacttgcattatgtatactttgtgccagcaactctttgcctgtcccggattgaccgataagcagaatatccgaatctgtctcggcatagcgccgggctttccgtattaattctctgatggccgggctgctgccgataatatcgtcaaaagtatatttagccgtccatccgagattttttactttctttcgaatgaccttctccgcattttggagctggctgacattctgaaaggacaccacgtagcagaccggactgtcttttagatggaccgggaacttattaaccgacagttttttatctttacaaacgatgatttcgttataataactttcactgtcgcacaaaaacgccggaagaggatggatgccgaacagtttttctaaattttcttccgtcatgtcggaagttatacttaaaatattctgcgccttattgttatacagcatgattttcttgtccggccccacaagaacaattccttcggaagaattgtccagtacagtctgtatcagaagtatcctgcgctgctggtacagtttcatccggaaaacacgctttgtctcaccgaacgcataccacaaagccggtttgcctgtgtgaatcagcagacattctaagccgtgctttttcgcgaactgacagctctcgacaccgcctataattacttcacatccgtccttaatcgcccgccccagtacactcacgacatcccccggggcatcgcggaaatacatctttacttccattccaagaatttccccgatatggtctgccccaagaatcatgtttctgcttcccactatccctatgttctgtcccagatacaggtctctggccgtcttcaggcaatagatcaaatcagttcccgataccgggatatcgatgaccgtaagtcccggcagtcttctgcgcaaaagatccgcggttatccctctggcaattaccgcatcatatctctgcagattaaacttctcggcatccgacacgtcactgcttttgatttccatttcttcgagacagtatctgcactgaataccgtcatccggctcaggtatcagtttgttatgctcggcaaaaatctgtccggcattcttaaaaaagccgcgtttaggtgaaaccaatgcaattttaacttccacaccgcataccctcctttatttttatatttttaattcgaatattttctctgtctattctttgtgggtataatgatacaagaatatattttctgtgtaaatagtaatttatcgtgaattttctgattatcttttactgcacaccacaaccgccggtgataacaatgcacaaaaatcattccatctaattatgaaatctgtatattgacgaaacactgaaaatagattatcatacgaacaagaaacatctagcatgctaattattagttaacatttaacttgttgctttatatcacgcatgctgacgatgctcattctgcgtcagggaaccgaacggccgccactccggccgtctcttacactccgtacagcgaatcacctgttatgctccggattccggacaaagcgatgaatgttaacacaaaaactgctgcgtacttaaaacaactgctggattgatagtaaaatgacagcaaagctggtagacaatacaacagcaaaagtggatggaatgtaacagctttcggttcccctcctgatgcagcttcccttcactatagaaaatcaggctctatttttgtggttttagacgaaagaatcttttttcgaaagatgatttttcccctttccagaggtattttccccaaaaataatatatttttttatctatatgtaccaatttttagcatgcttattgattattcatcaattattagcatgctatattttttacatcaaaactattcacattcatttataactgtgatatactcctgtttataagagcagcgccaatgacgcaggagattttatcaaaaacattcaaatcaggaggaacaaatcatggaagtaaagaactacaacaatctgttagtggaaatcgaagacggtattgcagttataacaattaaccgcccaaaatctttaaatgcactgaacagcgaaacgctggccgagttaggtgatattgctgcagcgattgaaaaagccaaagatgtaaaggttgtgattctgacaggctccggacagaaatcttttgtcgcaggtgcagatatctccgaaatggtaaatgccaccccaatggaggggcgcgccatggcattgctggctgccgaaacctttaagaaatttgaaaacatgcctcaggtgactatcgcagccgttaacggatatgcgctgggcggcggttgtgagatttccatgtgctgtgatatccgtatcgcggccgaaaatgcaaaatttgcacagccggaagtaaacctgggtattcttcccggcttcggaggcacgcagcgtcttcccagactgattggaaaaggacgcgcaaaagaacttatctttaccaccgatcagatcgatgcccaggaagcttaccgcatcggcctggccaacaaagtagttccccaggaagagcttcttgactactgcaaggcaatggctaaaaaaatcatgtcaaaagcaagctttggcgtcacccttgccaaacaggccatcaacaccggcatggatacggatcttgaaagcggcctgaagctggaagcaaacctcttcggactggcattttccactcatgacaaggctgaaggaatgcaggctttcctcgaaaagagaaaagcggagctgacagatttttaaaacagaaaagatttctacataaaaagatgtgtcaccggagttggagcaaaatccggctccggaactttataaatttttttgccattaattatcagacactttaatttatatgcgacatttaattgtttatatttaattttatcaatcgttgtctttcttcatccaatcaattatatgatctatttaactgtgtttatcaaattatgattatcacatacaggaggtatctatgagtaaggtttctatcattacagccggcgaagcagccgctctggtcagcgacagcatgaccgtgactaccagcggtttcgtggcaagcgatatgcccgaggcgctgtcgaaagccctggaacagagatttctggaaacaggctccccgagagacttaacccttttctatgcggctgcccagggaaaccgggacggcagcggagcagaccactttgcgcacgagggaatgacgaaacgcgtgatcgggggccactggaacatggttccgcaattgggccgcatggtgctggaaaacaagattgagggctacaacctcccgcagggaacgctgtctcagttattccgtgacatcgccgcccaccgtgtcggcacaatcacccacgtcggtttgaacacctttgcagatccgagaatcgaaggcggtaaactgaactccattacgacggaggatttagtcgaggtggtcagcattctgggtgaggagaaactgctttacaagtccttccccatcgacatcgccttcatacgcggtacctattccgatgaaaacggcaatatcacaatggagcacgaggtggcgtccctggaatccacttccattgcccaggctgtcagaaacagcggcggcaaagtgattgtacaggttgaaaaggttgtgaaaaacggctgccttgacccgaagcttgttaaaattccgggaatctatgtggatgccgtcgttgtatgtgaggacatgaaggatcatgagcagtgcgtgggctgtgagtatgacggctccatgaccggagatttttccgttcccttaagcagtcttacttatccgaagctctcggccaaaaaaatcatcgggcgcagagcagctatggaactgaaaagcgattctgtcgtcaatctgggaatcggcgtgccggaatatatctccatggtagccggggaagaaggcatcggtgactacatgaccttaaccgtggaggcaggccccgtcggcggagtgccgcagggcggcccgaaattcggcggttcggtcaatccggaagcgattctcgaccagccgtaccagtttgatttctatgacggaggcggtgtcgattacgcatttctcggtcttgcccaggccgacagccggggcaatatcaatgtaagcaaattcggaccaaggattgcaggctgcggcggttttatcaatattacacagaatgccaagcgggtatttttctgcggtacgtttacggccggtggactttccgtctcatttgacaatggtgagcttcagattgtctcggagggcagagagcagaaatttatcaaacaggtggaacagattacattcagcggcgagtatgctaataaaacgggccagcccgttctctatataacggagcgcgccgtattcgaactgagaaaggatggagtttatctgattgaagtggctcccggcatcgatatccagagccagattattgaccagatgggattcgttcccaaaatggatggtcagccaaagttaatggacagccgtattttcagggaagaactgatggggctggcaaaatagcataacgcaaaatagcaaaacaaaacataaatatggtggggatcagtttatgaattttcagatttggattttatttattgctattgttttatttggtctgctggcatttaaacaggtcagcgccctgatactggctccggttattacaatcttcgtggccgtctgctcagggcttccgattctagccagcctgcagaaccagtttatgcctgctgccggagactacgttatcaaatattttctgatattcttcgtcggcgcgctgttcggagctgtctaccagttcacaggcgccgccgaatccattgcaagggccatcgtcaaggtcagcaaaggaaaatatgcagctcctattatcatgtgcatcaccggaatactgacatttggaggagtcagcggctttgtcgtcttcttcgtcatctatccgattgccatccagttattcagggaggccaacctgacccgccggctgcttccggccgccatttccgccggctgctggacctggtccatgagcggtcccggctctccgtctatccagaactatattgccatgacgaatctgggtacgccggcaacggctgctttcgtgccgtctctcatcaccacagcggccatgtttgccatgatatttgtctggctggaatacagagccaggaaatttaccgggaaagggctgaccttcaacgatccgtctctcaaataccagcttacggaggaggaattaagcaccgaaaaagataaaacgctgccgcactggcttaccgcgttcctgccaatcattattatcctggtaacctttaatatctttcattttccggtggagaccgcagtgttgacaggaattgccgcatccgtccttcttatgttcagaagaatcggcggacttaacagctggattgaagtttttaacaaaggtgccgccgactcgggcgtcgctatcctgaacaccgccattgtcgtcggtttcggcggtgtggtgcaaaacacaagcggctttgccgatttagttgccatgcttaagaatctgcatatgccgccgctcgtattcgtcatgatcacagttgccgtctgtgccggagcctgcggttccgcctcgggggaatgggcgttgcctttaatgccttaaagaacacttatatggaaatgggaattaatttccagtacgttcaccgtatttcagccatcgctgccggtactctcgatactctcccgcatcagggagcacagatcacgctgctgggcatctgcaaaatgacccacaaagaagcttactgggatatcgccgttacacagatcatcatcccgtttatcgcatgcggaatctttattgtactggcgtccttcggcttatagttgatgaaaggcattaccgtgatattacacaaaaaaagaactgataattttacatattgtatattgactatcgaacaaaaaaaatgtattatttatgcaagctattaattagcatgctagatattcgtattttaaatttctagcatgtaagtatcgaaacaatgtgtccgtaacacggactccaaatcatttacttatcttaaaggaggtaacaccatgaatttccagttaacagaagaccgtttagcattacagcaggcagtaagagaatttgcagagaaagaactcgcgccgggtgtcattgaacgtgatgagaagagcgaatatccggtagagctttataagaagatgggagaaatgggactcatcggacttccctacgccaaagaatacggcggttccggcagggactatctggattacgcaattgcagtagaagagatttccaaggtcgatgcatccgtaggcatctcctactccgtatccacctccctctacggcggaagtattgccaatggcggttccgaagagcagaaaagagaatttcttccggaagtcctctccggaaagacctttggctccttcggacttaccgagcctaacgccggttccgatgcaggcggctgtgttactattgcagaaaagaaaggcgacaaatacatattaaacggcctgaaatgcttcaataccaacggcccgctctccgatcactttgcagtatacgccctgactcatccggagctgggaagcaaaggactctcctgcttccatgttaaaaagggaacacctggattctccatcggaaaaatcgagaacaagatgggtatccgctccgcacaggtttccgaactggtttttgaaaattgtgaaattcctgagacagctcttctcggcgaagaaaaacagggatttaagattgcaatgaagacgctggacggcggacgtatcggggttgcggcacagggtcttggaattgcagaaggcgcttttgaaattgccagaaaatatcttatgacaagagagcagttcggcaaacctctttacagaaaccagtatctcgcatttaagatggcagaactggaatgtgaaatcgagcaggcaaaatatatgctctataaagcagctctcgataaatcggaaggaaggccatattccattccggctgccaaagcaaaactcgtctgcaccgatgccgctatgcatgtgacaaccgaggctgtacagatgcttggaggaaatggcttcatgaaggaatatcacgtggagagaatgatgagagacgccaaaatcactcagatttatgagggtaccaatgaaattcagaagcttgtaatcagcggagctttattcagataattttatcacctgcgccgtgccacaaagcgagagtcgaaccgcggctactatgctcaaatgcacggcgcagccttttttcagaaccgctgtctttggcggccgatgcacagaaacggcaaaaaacgccgttgattgtggtgaaaagttcacttttcatcgcgtcgcgccgtgtgactcgggattttcgtacagaatacgcacgaaaacacctcgcggaacacaaccgtgtgaacagcatctcgcctttctatgaaactaaggcttaaaaatcagttctgtttgactttgtattcgaaattttttataataagaatagttcgtataaaagatatttgcatagaaaggcgatgagaccacaatcatggaacttaaagaatgtattaattttctgctcaccactgcgcagcatacggttttccagtatctgagccagaggctggccccttatgacattactccttcccagtacggcattttaaactgcctgtggattaatgacggcacatgtcttccccgtcagattgcagaacttctctgcctggaaacctccacggtatccgggattctggacagaatgcagaagaaggatttaattgaccgcgtgatcaacccggaaaaccggcgtgagatactcgtgatgattactcccaagggtgaagctttaaaagcgcccgtcctgaaaatcatcgacgaagtcaatgaggaagtcttgaaggatttcagccccaaggaaacagagtttattagaaaatcgctgcggcagattgcagaaaaagcattgtagtcttcatgacacaatgcttttttctatctttacaatatccaggaggatttccgctatgaatataatcgccatcattcgccagacttctgcagattcgcagccaaaacaggatcttgcggcagtcgaggctgcgctccggtatacaagacagtccggcggtttcgtgactgccctctgcctcggcaccgaagccgccgttcccttgttaagagaggctgttgccatgggctgcgacagcgccgctctgatccggctgcctttttgctttacttccatccccgagccgacccggtatgcccggctccttgccggcacgattcaggatatggaatttgatttaatttttacaagctgttacgcggtggacgccgatacgatacagaccggctttctgctggcttcttacctcaatcttcctcaggccggctatgtggatgagacgtccgtctcagaggacagcggcgtgattgtaaaaagacagttcgaggatcggtaccagatgcttaacctccccaccccctgcctgatcagcgctttgctccagcccggaaaacggatctatatgacggccgacggcgtcacccgggcctactccatggaaatccccgtaattccggcctgcgaagatcttaatgccggggaagaatctttcgtcacgctcctcagctcctgcctgaaaaaggaacgcaagcggggaaccgttcttaccgtgccgacagaggaagcgattaacgccgttatggatatcatgcacaaaaaccatatcatatagaagagagggagataaaatatgaaccacgatattgttgtagccgcagaacaacgcgacggtatcgtacagaagatcagttttgaactgattcacggcgctgccgaggtggccggacagaccggcggcagggtaattaccgttatagcgggttttgagataaaggaggctgcagaacagctgtctgccgcgggaagcgatgaagtctggataattgaccagccctccctgaaagaatatctgccgaaaccgtatacggaggccttcctccaggcggttaaacgtattgagccagaaatcgtactgatcggctccaccatgattgggatggagctggccccacaacttgccgccggactggatacgggactggtgaccgactgtaccgcccttaccatttcctccggtacgggcctgcttctgatgacccgccccaataccgacggaatatcgattgatacatttatatgcggtgaaaggcggcctcagatagccacagtccgtcccggggtactggctgaaaccggcgctcgggacaaagcagacagccggaagagcgcagaaaaagtctcacagcctgctgcctgccccgcggaactgtacggcattttaccgcagatttatccggagctgataacggtgtaaggctgctctccaccaccagaggcggggtaaaatcaaccgatatcacccaggcccgcgttctcgtcgcaggaggcaggggcatgggcggcccggaaggatttgatacgctcagaacactggcctcccttctgggcggacagatcgcctgttcgagagcctgcgtggaggccggctggatcgatgcatctcctcaggtggggcagaccggaaaaacggtccggcccgaactctatctggcctgcggcatctcaggcgcctttcagcacgtgacggggatggaagaatcacagctcattatcgccattaacaaaaacccggccgctccaatcttcgatatctccgatctgggaatcgtggggaacgtcgaagtgctgctgcccaggctcattgccgcgcttaagtaacggttcatgctgtctgaatgtacatcgcaaaacgcaaccgtgtgaacagtaacctcttaatgcctcatgttgatttgagccggccgtgagcattgacaaaaaatcccggcgatgctacacttatttcatctcaaaatgacggcgcatcctgcgtatttacgtcattttaaaaagtataaggataaggtgaagagtatggattataagaaaatgtatgctgaaaaacttgtttctgccgatactgccgctgctgcagtaaaatccggcgactgggtagattacggctggacaaccggaacccctgttgccgtggacgccgcactggcaaagcgtatgcccgagctttataatgtgaatttcagaggcggaatcctgatgtgggtaccggaaatcttcaagattgaaaacccggccgagcatcttacctggaattcctggcatatgagcggaattgagcgtaaagcgattgcacagggcttttcctattatgcccctatccggtattccgagcttccaagatattacagagaatccgcttccaaaccggatgtggctatattccaggtcgccccgatggatgaacacggatattttaatttcggacctaatgcctctcatatggcggcatgctgtgagacatcgaaagtcattattgttgaagtcaatgagaatatgccggtctgcctcggcggctttgaaaatgtagtgcacatttccaaggttgacatgattgtggagggcagcaatcctccaatcgccgagatgggcgcaggcggagctgccactgaggttgatgaagctgttgcaaagctgattgtggaagaaattccaaacggcgcatgcctccagcttggcatcggcgggatgcccaatgccgtcggctccctcattgcaaagtctgatttaaaggatctgggcgtacacacggaaatgtatgtagacgcatttgttgacatcgctgccgccggcaagatcaccggctcccacaaggcaatcgacaagggacgccaggtatatgcattcggcgcaggcacgaaaaagctgtacgactttttaaacaacaacccggaatgcatgagcgcgccggttgactataccaacgatatccgttccatctccgcgctggataactttatgtccatcaacaatgccgtggatgtggatctcttcggccaggttaatgccgagtcggcaggtgtcaaacacatcagcggtgcaggcggacagttagactttgtactgggcgcttatctttccaaaggcggaaagagcttcatctgctgctcttccaccttcagcacaaaggacggccagctgaagtccagaatcctcccgaccctgaaccagggctctatcgtaaccgatacccgcgccaatatccactatctggtaactgagtacggcaaggtcaacttaaaaggtctttcgacctggcagaaatgcgaggccatcatctccgtcgcacatccgcagttcagggatgaactgattaaggatgcagagaagatgaatatctggagacgcagtaataagatttaaattgcatgtcccggaaacgtctgtccggatcggatgtttcgtatctgaacgataacctgcacgcttcgcgaacaggtcaccgtcatcaataaaacagagtcatatcggacctggttaaataaggtctgatatgactctgtttttatttatatgttttatgtttcatgtggccggcgtttggtcaatcagcccgttcatctgtccttcccggtggtctcccgaatcagtctgccaaccgcctcatccgtataggaaaggagttttccaaactcccgcgcaatccggtaacgttcctccccttcgtagccgcctgctctcagcagtcccgctttccgctccttcagttccaggtaacagtccaaatcttccttcttcttataaaaaataaagtgtttggccctccggttcatctcttccgggaacaaatcggtgacaaatgagtcatcctcagcgtacatcatcgttccatattggctgcaaatttcccggcacgcctccagatactggtcacgctcctctgccgtccggcatggatggctcatggcaattcgcttgacaccggcgttcaccatctcgttaaaacagtcgattacccccaactgataggaatatgaatcaatttctcttttgctcattttcattccacctcttcatcactttaacaactgcaccaatactcctcccagggtcagcatcagagccccgcaggatcgggtcacaatctgtgcaaagggaagcagttccattcgtttcgcactgctgagtaccgccacgttcccggaacctcccatattggttgtgcacattccggccgcaattgcggattcgatcggatagaatcccattttcttaccgacaaaggttgccgtcagcgtaatcgccgccacgaccagaaccacagtcagcagataaaacggggtgattgtgctgagaattgtcttaaggtcaatgagtgtcgcaccaatcccggtcagcgctgcagccgtccagctatggatggcaaaatgcccccattctctggccgcatcctccagcccctccgacataatccccgtccccttcaccaggactacggcaataatcatccacgcataggtggggataacggaaatgtagcggtggcataaagcccccagttcataaaaggccagcgatattatcaggcccgtacacagcagggcgaaggtcggcttcatcggaggacgcgggcaatctcattaccgtcgttgacaagccggccgtttcccgtcagatgcggcttcttttctcccaaattaccggcaagggcgccgaacacgatggccacacagtttcccagtaccgtagccggtgcaattcgtgtcaatattgccccggcgtccgcgccgagaaccgatgaatacatctctgagagcggtacggaaccggccgtcatcccgccgctggtcatcggaatgccgatatacaggattccctccagaaagctgttgcccataaacatccccagtacgcccgacagcgtcacccccaccgccaaagcgatgaccgccgtcggaagaagcttcaccgtagccctgatcagcagatccctgtcaatattgaacaggctgcctgttatcagagcggaaatataaaacaccaggaatccctcctggttgacaaaattatctatgattgcatgtgtctgttccggtatcagaccggccgcctgaataaccgccgcgcccagaatacagatgacggagccgcccagataagtcttgactaccggtacggagtttccgattgcattcagtccctctcccagcaccatcaaaaatatcatcccgcccacaatcccgcccggcaggcagccggtatacatgcagacaattaccaacgccaggattccgagatataacggaagcggaaaaccggctatcttaaccgggaattttttatccggaatttttcccatttttccttcctcctctcctatccattttatcatagcatagcaaaaccgcaatttctacaacaattataaaacctttcccctgttcggaataaaatgaaaaaatttctcatttcttcttgcatttcccacctgtccggaatataatagttgagtatgacaacagttatattatgcaacatacattttcttaacaatttgtatgtatctttttattatatggattgtatctgatttcaggaggtcattatgcaaatcaatattggtattatccgcagatgtgagcagagcttcctgcgggagcgtctgagtacctgtcaattgaaaccggtagacagtgtcgtcctgacggctttagaccgccacggccagtgtaaccaggataccctgtgcagtattgtcaatattgacaaaggcagaatggcccgtgtaatggaacgtctggaaggccgcagcctgatacggcgtctgattaaccctgacaataaacgtgaaaagctgatagaaatgactgagcaggggaaacagatgctggaaatcatcaattccttttccaaagaatggaacgaccgctgcttcgacggtttcacggaacaagagaaaaacgagtaccagggctatctggaaagaatcgcgagaaatgcccttgcaggaaaggagaatttagaaaatgattaaaaacctgacggaaggaaaaccgctgaagctgctgtttttcttttcccttcctatgctgatgggaaatctgtttcaacagttgtacaacatggtagactccatcgtagtgggcaattttgtcggagccgacgccctggctgctgtaggagcctctttccctgttgttttcctggctgtcgccctggcctccggtttgtccatgggctgtaatgtcgttatatcacagctcttcggcgccggaagaatacgcgaaatgaaaaccacgatatccactgccctgattggacagttcgtcctgagcatcggcatcacgatagtaggggaaattatttctcccggtattttaaggatgttaaagacaccggacaatatcatggcggattctcttatctacctgcggatttatcttggcggcgctgtcttcctcttcatttataataccctgaacggtatttacaatgccctgggagacagcaagacgccgctttattttctgatgctgtcaactctgacgaatatcgtgctggatctgctgtttgtaatcaaattccatatgggtgttgccggcgttgcctgggccaccctgattgcccagggcgtatgtgccggactctccatggtcgtcatcatggcccgtctgaagcatctggaggatgaaccgggacacgaggatgagggaaaacggcctctgttccatttctcagccgtggaacgcattgcccgcatcggcgtgccctcaatgatacagcagtccattgtttcagtcagtatgctgatgatgcagggccttgtaaactcctacggctccgttttcattgcaggatatacggccgcaaccaaaatcgacagccttgccatgatgccgaatatgaacttttcaaatgcaatgtccagttatacggcccagaatatcggcgcgggaaaaattgagcgtgtcaaggacggctataaggccaacatgtttatggtggttgtcttcagcggcattatcacgctgattatcttcctgttcgggccaaaccttctcaatatgtttatggactcgggctccaatgtacaggcgattaactacggcatggaatatatgcgtatcgtctcctccttttatatactgatgggaattatgttttccagcaacggacttttaaggggagccggcgacatgaagaccttcatggcaagctccctctgcaaccttttctcccgtgtattcctggcttatttcctggccagccgcatcgggccgagcgctatcggctggtcgattccgattggctggctggtaggctccgctatctcctttacacgttttaaaagcggaaaatgggcgaaaaagacacttgtgaaataatgatatcaatggcacggagaaaaagtgctgcggcagaaagcgggacagggaattacctgctctcacttctgccgcagcacttattttattgatgacggtgacctgtgcgcggagcgtgcaggttatcgtttcacagttttgatatcagttcagaaatgctccatttacaagatggcgcggtgtctttccctgtgcgtaatcctcaatatcttcgaccagcatcgggataattctgtccgcaatgtcggcagttccgcctccaatgtgtggagtaacgataattccaggagtgttcagcaggggatcatcagggcttaaaggttcctcttccacacagtcgatcccggcgcccagaagcctgccctcacggaccgcatcggcaagcgctttttcatccaccaggcctccgcgggcagtgttgattaatatagcgccctgtttcatccggctgatctgccctctccctatcaggtggcgcgtcttttgcgtcagcggaatgtggagcgtgataatgtcggaagtcgctatcatgtcatctaaagcagtgtactccagttcatactttttctccatttccggagacaggcggtattcgtcataatattggattctggctccgaaggccctcgccttatctgcggtctggcgtccgatattccccgctccaattacacctaacattttcccgttcagagaataggagctgtcgagaaatgtattcttgctccattctcccctcttcagacaggcctcgtggctgagcagctttcttcccaccgcaagcatcaaaaggaccgccagctccgacacggagcctgcgttggctcccggcgtatttgttaccaggattccattttcaccagccgctttgatatccactgaatcatagccggcgccccaccgaagtatcattttcaggtttttgtttcgctccatcacttcacgcggagctttaaaaatacgcagaatcataatctgtgcatctgtcattaaatcataggcctcctgggtatctaccgcagcgagggagaactccgtctccggaagaagctttctcaccgcttcgtaagttccctccgggtattggcccgccagtactactttaatcatatcatcactctttctcattattcttcaggggttcgtaacagttcagagagcgtgaacggttacagggattctgcaatctccgcaatcagttcgggcttgggattctttttattaatttccgacacctctgaaataagccggtaaagggaaacgtttttctctgccgccgcagctttaaactgctttacaaagctggaatggcagccggaatagcccagtaccagatcaaggggcggaaccggattatggtacttgtattgttccatagccggctggagcctctggtcgatgaaatcgagcattccgtagaaatcaatgtcctccatctgtcctctccgtctcatcagagcaacacacatctccgtggccaggttcccggcgctcctcgccattcccatcaggccgcagtccagtatggaggctccgttctcccatgcggcaaccgcattggccgcagacattcccagattattatgaccgtggaacgcaacaggtatcgtcacggcccggcacaacttttccgtgtatgctgccacctcatcgggaagcatggttccggccgaatccataatggtaaactcgtcaagtcctgccgcctccagcttttttccttcctcagccagttcatccggtgtcaggatgtatgccttcatcgcagagtagaaagctttcattttcctttttttaatatccccgatcgctttcacggctatctccccgtctccggcgtcggcgcccaccctaaggaaagacaggccgttttctgccgccaaatcaacatttttctccctgtagcgcttcgcgttcaagaacatgccgagcatagaagaacggtttaaatatttcttcgaaatgttcaggtattcctcgtccgtaagagcatcggtaaatcccgcaacctcgtaggcgccgattcctcctgcatttccgaactcgatgatcggaacgcgtgacgccgtcagtccgtccagtaccatatcagtaagttctgcggaaaatccctttcccaccacattcgctccgtcccggagcgtacagtccataagctgtaatttcatgttacaatcctcctcaccattaagcctgctgttttttccttgcaaaatatccaaatcccacagctgcaaaaccaaccatcagcgctgctcccacgcccatcgtcaagccgattcccgtcatcagccacataggtgccagtcccacgaatgaatctttccagcatgtgagagtcgtataaactccatgggtgtcgcctgctgatgagttggaatccgggtcaaccgcacgtaccagggccaatcccgttgaagtgtttcccgtggcggctccgaatgccatcatcgccttctcaaaccattcatgtttacagaattttttggcggtaatcagtacgcacggtacagtcactgcacacagtgtaaacgtataaatcagaagcggagcaatataggtgctgataaactccacatcaagtgttgccatggcggtaaatactacgagttccagcaaaaatccgctgattagtttaatcgtctttatgtccacaaaccggtcaagcttcaatatctcaagcactttccacaataccgctccaccgataacaccgtgcagaacgctgggcaggaccttaatttcactccagaaattcccgataaaggaaaataactgacgtcccacaaacagtgcgcagagcagccagcacgtctgaagcgcaaggtggttgatgctgataccggttgtcacggtatgtcctgtcggtttacggttttcctccggcagagtaccgccgtagaaccatgacggctgcgccttcggttccttgacataggtagcccagccttttcttaccccgtagttgacgaggaccatgcccaccatcattgccataatcagaccgaatgttgaaagcaccatgccgacagccatattaccttccacgcccagctcctcaaatgtcgctgctgctgcgcctgccgtaccatgcccaccatggaatgagaacacacccatgattccccagccttttggaagtcccggccatatctggctcagcaaatagcccagcccggtacccaggcacatctgcaatccgtaagctgtcatcggaacacagacataatccagataagagaaaatcttgtccctgttaaaactgaccccgaatacaagagacgccatcacgatgtcgatcagaacattgggaattccggaataactgtccggtactgtaacaaccccaatacctgctggccaagcagtaaaattaaaagccctcctatcagcgatgcaggcagaaacagtttttgcaacggttttatgtattccctgatgaaaaaacccatcaacataaatacggctaacagcagcatgtcactgcacaatgttttaattgtcataccccttctcctttttctattgattttttatacggttatgatatcatttagatacaacaaagtctaacagtatatatttggtttattaacaatataaatattgtggttaaatacggggggattgtgaatgaatttaaaaagtattgaatactttctgatcacagtagaggagatgaactttaccagggcggccggccgcctgtatatcagccagcaggcgctgagcagccatataagccgtctggaggaggaatacggcatacggcttttcgaacggaggccggcgctcagcctcacgccggagggggaagagatgtatttttacggcagccgtattctggaagctgagagaaagttgagggccgctttctcagatatccgggaaaactgccgcgcaacaatgcgggtggggatttcacgcctccgcggcgaagtattcttccccaacatatggaaatattttcacgcctcccaccccaatattacaatcgatttaatcgacgggaacagcgaggagaatgaggaacttcttctttcaggtaagctggatctgtttatcggagtggatatccctccccagcctaatctctgcctggtggaactggcccgtgagaaagtccagtgctgtctttcccgtacgctccttcagcagtattatcccgataactgggaagtgacacttgaaaactttaaacagggaatcgatttgtcgcaaatcatggagcttccctttatcacagtgcggcagaaaaacaggctccgcaaagcactcgactattattttaccgccaaacgactgaagccccggattatctttgagagtaaccagcaggaactggcttatgagctctgcaaaagcggagccggcgtcggccttttatcaccgctgatcctataccagcacctggatgccattgaggaggactccgagccgctgtatgtctttccgcttctgaatgaactccatgaaaatattgtctccctggcttaccggaaagactatccgctgcctcgccacaccatggaattcatcagcgcctcctgtatggtattcaggaattattccaattctatccgtgaaaatttctccccgcattccgggcgccgcgcgtaaggagtctgcacaggtacaaaaactatctgaatggagatttaactgaggttgggaggacgcgtccggaacggaccatgtccggtgtggtgatggggatggctgagtcttccgtccccgtgggaagttggttgtggaggggaatccggccggaatgaattgctgcggggaccgtttgcactctttggagtgcgcaacagtgctaagctcgtgagggacctcgccaagcaccggcggactcccatgtccccctccgcaattgattccgcctacttccccggggcagatttttgccagggacggaacactcaggcggaagttttcgtggcaccggacatggtccgttccgggcgctgattgtctctaaccttaaatggggaggaccctgtcgcgaccactacgtgtttccggcaggccgatatcaaatcttccacaattctttcataagggcgccttgaaggcatatcgtatttcccgcacacggaagcactgattggccgcgacaaggtccgccctccgcacttaacgcgtgagacattcagcggccgcaggccagcggatggggccgatacacttggcggagtctttcgttccggcgaaaaccttccgggagaaggagatactgccgacatcttccggcggagaaggagagaatgatatccggaaggacgttcgcccgagagatgatagctcttaggcagagggagacaaagcgcgccgggcggattttagccctacaagggcaaaatccgggacaacttgagcttcgaactcattcggagttcggagcgaatttgtccgtaaccccggggctttgccttcctctgtcttagagctatccctcgaagaagcagtccagccggatatcattctctccggctccgccctgcgaaaacaaaaccacagtatctccttctccagccagcgatgccaaacccccgggacgaaagactcatatacatacccgaccaccccgtccgctggccgtaccggcggcgtcctcacctgcttaactaaatctccatacgaaaaaacaggaacaccgctcctgccgggaaatccttataatttcccggcagtatgcgacactcccgtctaaaagctgcgcctttattaattattataaaatatggaatgtaacaaccactcctgcgaatacgatcgataccatcgttgtcagcttaatcagaatgttgatagccggaccggacgtatccttgaacggatcgccaaccgtatctccgacaacagccgctttatggcagtcgcttccttttccgccgtgagaaccgctctcaatgtatttctttgcattatcccacgcaccgcctgaattggccatcatgatggcgagtacgaagcctgtgaccgtgtttccggcaagaagtccggccacgccgttgactccgagaatcaggccgacaacaacaggaacgattacggcaatcagggcaggggcaatcatcaggctctgggccgactttgtacacatgtcaacgcaggctgcataatcaggctgtccttttccttccatcaggccggggattgacttgaactgacggcgtacctcaactacgatggactgtgctgcttttcccacggcatccatggtgagggccgcaaacaggaatggcagcataccgccgataaaaagtccgatcaggacaggcgggttcgtaatcgtcagatccatctggaaatcaggtgcaatctggcgtaccttatcaatataggatgcaatcagcgccagggctgtcagggctgcggaaccgatggcaaagcctttaccggtagccgccgtcgtattacccagagaatcgagggcatccgtacgctctcttacttcgtgaggcatatgtgtcatctcggcgataccgcccgcattatcggcaattgggccgtatgcgtcggtggccagtgtgattcccagtgtggacagcatacctacagctgaaacacctacaccgtaaagtccgaggttaaagtcggaagctccgcctgcacagaaataacttacaagaacagaaatacctacaatgattaccggagccactgtagaaagcattcccagtgacagaccgctgataataacggttgcagagcctgtctcactggaagcagccaggttctgggttggtttataagaatcggatgtgtaatattccgtcagggctccgatcaggacacctgcaataagaccggaaatgatggccgcatatacacccatattatccggcagaagaatcttaaccgcaacaaatgctgcaataataattaaaacagcgctgatgttcgtaccttttctcagggcctgaagcaggctcttctgggatgcatcttcctttgtgcttacaaagaaggtgccgataatggagaaaataactcccattgccgctaaaagcatcggaactgcgacgccctttacacccagaccggcggctaccgccagtgcgaatgtagataaaatggaaccaacataggactcgtaaagatcggcgcccataccggcaacgtcacctacgttgtcacctacgttatctgcgataacggccgggttacgcggatcatcttccgggatacctgcctcaaccttgccgacaaggtcggcaccgacgtcagcggcttttgtaaagataccgccgcctacacgggcaaacaacgccatactggaggcgcccataccaaatgtcagcatattggttgtcacctgggcgatacgctctgcctccggcagtgagccaaacacaacattcaggattgtataccagattgtgatatccagaagtccgaggcctacaaccgtaaagcccattacggaaccggctgaaaaggcaaccttcagtcctctgttcaggctgtgagatgctccctccgccgtccggcagtttgccattgtggcggtacgcataccgatgaaaccggacaagcccgagaaaaagcctcccgtcaggaacgcaaacggtgtaaagaagcctaataaaccgctgaaagccataacaagtaaaattacaaacataactgcaaaaaagataccgatacccttatactgtctcttcagataagcattggcaccttcacgcacagctgtggaaatccggatcatctcagaattcccttcgggctgtttcttcactttggcaaacatagatgctgcaaacaaaagcgctgccagtgaaccaaccgctacaaaatacatagcatacataatttttcctccccttggtttggcattgaatattgtcactttgtgaaccgtaacaaaattataccttttcatccattatattggcagaatccggcaatttcaataacactttacagatactttacaaacccataccaaaatcgcattcacactttatttttttcggaattttctttatatttaaaaaatttataaattattattgtcaaatccttgtcaattttatgcagaaaggtaaacagccgcatcggcaatcacattttctgaacctttagtagctcctgatccggtccgtatcgtcctcgccggtcttctcaattttctttatgacaacggaataccccgtattttcaccgagccggacgtatacgctgtccccttccttatggcctcttaccgcctttcccagaggtgattcaatactgataagccctttcagggaattacctctgatactggtcacaaggcggtatacttcttcctcgtcatcatcctcaaaataaagtgtcaccgtgtcattcaggccgacttcatccgacccggacttgtccgataccaccctggcgttttttatcatattctccagataacggatccggctctcattccggtttttatccttctttgccgcataatattcaaaattttcgctgagatctccctgggccctggcctccttcacggcctcgatagcctctttccggaccaccagcttcctgtattctatctcttcccggattttcttgatatcactttccgtaagctgctctcgcatatccatcaccctctgctgtgcctgaaaatttatgcggctgtctgcacaggcagacagccgtaaatatgagcgtttctgttcccatccccctttaaatagataagttctgaggacagtaacatgtaaattccctgacgttaaataatatgtccctttgccttcatgacgtcaatcacctgatctacatatttctcacagatttcatctgtaggagcctccaccatgacgcggattaccggttccgtaccgctctggcgaagtaaaatgcgcccggtatcccccagggcctcggcagctttctgaacttcagcctggacatcggcatcatcctgagcctcagctttactcttaaccttgacattcttaagtacctgaggataaatctgaatctcagaagccagcttgccgagggtctgcttcttctccaggataacctccatcactttcagggaagtcaggattccgtcacccgttgtggcatttttgctgaatatgatatggccggactgttcaccgccgaggcaatggccgttctgagccatattctcatatacatacttatcgccaactgctgtcttttcaaaattaatgccttctctttcaaaggctttgtaaaggccgaagttagacataatcgttgtgactaccgtattattgacaagcgtgccctgctccttcatgtactttccgcagatatacataatcttgtcaccgtccaccacttctccgttctcatccacggccagacagcggtcggcatcaccgtcataggcaaatcccacatccagtttatgttcctttacgtacttttgaagctgtccgatatgagtggatccgcagtttgtgttgatgttgataccatccggattattgctgatcacatgcgtctccgcaccgagggcgtcaaatacgttctttgcgatggcaaaggcgcttccattggcgcagtcaagtcccaccctcatatttttgaaggagcgtgtggcaattgaaatcagatatccgatatagcggtttctgcctgccgcaaaatcaacggtgcggccgatggcatcacgctttgccagcggaatctccgccgtcgtcccatccagatattcctctatcttttcgattacctcttcttccagtttctctccgcgctcattgatcaccttgattccgttatcgtaatatgggttatggctggcggaaatcatgataccgcagttgaattcttctgtcctgaccacataggagacactcggcgtagtcgttacatgaagcagatagacatcggcgccggaggcggtcagtcctgcaacgagtgagtactcaaacatatagctgcttcttcttgtgtctttgccgattaccacacggcaccggctgtcctgtgctttctgtccgtaataccagcctaaaaagcggcctactttaaacgcatcttcaactgtcaggttcacattcgcttcaccgcggaagccgtctgtgccaaaatattttcccatctgtggatgtcctccttgatttgtctcttttcctgtcctgtctgcagctaaattgaattatgaaattccatgtcggattcctgttttcttatttaaaatgttatctccttcagataccgctccagggcgtcctgccatgacggaagacgctcaaagccgttctcctccagcttatccttgctgatccggctgttcatcggccgtttggcctggcccggataccggctagtatattcctctgtatccacaggcgtcaccttcacgtcttccatacccgcctttttaaagatctccacagcgaattcgtaccagctgcagagtccttcattggtggcatgatatcggccgtatttatccgtctgaatcatatccactaataatctggccaggtcgtaagtataggtcggagaaccgatttgatcatccacgaccgaaacagcgccgtgttccctgcccaggcgcagcatagtcttgataaaattcttcccgttgacgccgaacacccatgcaatcctgacaatgaaatatttatcgagaagttcctcaatcgcaagctccccctcatattttgcctgtccgtaagcattcagaggctcccttacgtcatccggctcccatggacgttctcccgtcccgttaaacacataatctgtgctgatgtacatcaggctgatgtcaagatcgcggcagacttcagctatgttgcgtgtcccgtctgcattgaccttcctgcataattccatattctgttctgctgcatctactgcagtatatgcagcacaatggataacggcatctggtcccgcttccgtaattacgcggcggcatgcgtctttatccgtgatatccatctcctccacgtccacgccgataccctcaatcccgcgttttgccagttcgttcatcacatcatatcccagctggccttttactcccgtcactaaaactttcatcgcactctcctgttataacctgtctccgtacatcttatcaaaatacgagctgtactcgccgctgataatatgtttccaccagtcctggttctccagataccactcaattgtctgtttgattcccgtatcaaaattatacttcggctcccatccgatttccgtctctattttagtcggatcaatggcatagcgcagatcatggcccggccggtccttgacgtagcggattaagctctccggcttgtcaagcgcctttaaaatcgtcttgaccacttccaggttcgttctctcgttatggccgccgatattatacacctcgcccacacggcccttgtgaatgatcaggtcgatggcctcgcagtgatccgatacgtgcagccagtcgcgtacattggctccgtctccgtaaaccggcagttcctcatccgccagggcccggctgatcataagcggaatcagcttctccgggaaatgatacgggccgtagttgttggagcatctggacaccgtcacaggcagtccgtaggtcctgtggtacgcaagcacaaacagatcggcgcttgccttcgaggaggaatatgggctcgaagtatggagcggcgtctcctccgtaaagaataagtccggcctgtcgaggggcagatcccgtaaacctcatcggtggatacctggtgatatctctgaatgccgtattccctgcacgcgtctaacagcgtggtcgtaccgattacattcgtcctcacaaatgcctccggatcggtaatggagcggtctacatggctctccgctgcaaaattcacaaccacatccggcttctcattttcgaaaagttcgaagatgaactttctgtctgcaatatcccccttgacaaatttataattcggtttatcctccaccggtttaagcgtctccaggttccctgcataggtgagcagatccagattgataatctgatactccggatatttatttaccatatgatgtacaaaattcccgccgatgaaaccggcgcctcctgttacgatgattttcattgtatgcttctcctcttgtctctctgctgattatccctatttatcctggagcttatccacatattttccgtccagaacatctttcaaatatttgccgtattggtttttcttgtatacttcgtaagcagccagcacttcatcctcgctgatccagccgtttaaataggcaatctcctccaggcaggcaatttttctgtgctggtgcgtctctacagttttcacaaaattagtggcctccacaagcgactcatgggttcccgtatccagccaggtaaagccctgtcccatcagtattacatccagctctccgttctcgagatagatccggttcaaatccgtaatctccagctcgcctctggcagaaggcttcaggttctttgcatactccaccacccggttgtcataaaaataaaggccggtcacgcagtaattggacttcggcttctccggtttctcttcaatcgagacagccttgcccgtctcatcgaattccacgatgccaaaccgctccggatcgtcaacataatatccgaacacagtcgctccattctccttggaggccgcggcgcggagccttttcctgagtccctgtccctggaaaatgttgtctcccagaatcatagccacggaatcgtccccaataaactcttctcctataataaaggcctgggccagaccgtccggacttggctgtaccgcatagcttaaattgattccaaactgccggccgtcgccaaacagttcctcaaaccggggcgtatcctccggtgtggaaataatcagaatatcacgaatccccgcattcatcaggacggaaagcggataatatatcatcggcttgtcgtaaatcggtaataactgcttggaagttacttttgtaagcggatacaggcgggttcctgaaccgcctgccagaacgatacctttcattgtcttctcctcgtactttttattttctgcttatgtataatccgggacaatcccaacataacaccggtcccggaaacggtaacagttcggacagcatgagctgttaccagaaatgggcagacttcggcactataggtaatatatcacaaacgaattgggcttgtaaacggataacatttacaaaaaacttaatatttacctgtgtttttctatgtctgtccgtatttcacccgaatttattcaattttaccgtccgccgcgccgttttccccttcctgctctcttaccgcatagagaatggttctggcatcgttaaattcatagctgcatgtgacaaacgaatacagcccctccacatccccctccggcagctcacggaagctgcagtttttcgtcatctcatccacataccggttaaaccgttcccgggaagaaaattccgtcctgcgtttctccccgtccgcatccccgtacacagcggcaatggtccgcaaatgcagctccgattccggcagatagagaatgacttctctgttttccctgaaaaagctttcgtccttaaattttacaatctgcgcaaacatcgtctgattcttcatatgatgcccgtaaagaatggaatgcagccccatcaaatcgctgctgctgtcgcagtccaggaaaatcgttccggctgcgctcttatttccctcaaaatcccgtttcagataagtttcgttatcatctgcctgtacaaccgggtagctgatatcggttcccggtatttcaatccatgccactatatccggattcaccgccctgagactctcaaaatccacaggagaatggtactccgccggttcctccggttccatgtcaggcaggctttgcgtttccccatccctcaaagcccctgccggcgcttcttcctgaaccgcaagcttccgtatctcctcttcccttttccgctgtgccgtcgccttcagtatattgcctgccagcagtatgccgcagagaagtaccacaacgacaagtattgtatctgtgactctcgagggacgccttttgtgcctcccgccttctcttttattcttctccccggtcaacgattttccacctctgttccctatatatgctcattctattattttaaatttaaattaaagccgttttatatgattttatacatctttatacagactgtaataatccgattccagattttcactcatcgctttgtaccacttgaatgcgtcatccagcgcctgattgtaaattatcggcgccaatgtttccatgaataaatcaagtatctgctgctcctggataattcctatctcttcccctctcacatcaaggtaaaaagctcttatttcatcaattattttcctcttttcatcgtctgtcagcgacaaaatcggatatggtttccttgatctcaactgtttttcctccctggttattattgtttttgttttctttattgtttttatttgttgttttctttattgcttccgtttgtttttattatcctctaccccaattatttctctgaccgttcttcctgcatatgccggaaagtatattttgaattatatcacatccccggctatataaaaaccatatcccgtacgctgattgtctccagtgttacagttcagcctttggctaaactgcaacaaatgatgcacagaaacggctaaaagcgccgtttcgcgccgcataactcgggattttcgcaaaaacagcgaaaacacctcgcggaatacaacctggctgaactgttactctccagccgtcaagtcataaaggacatgaaggaagtttgccgctgcatagaccggcagcagaaaataaaagagacccccaaaagggcaatcacctgctccccgggggttctttctctgtatgccgttatttcactgtatgccaccgctgaactattctctgcggctgcactgtactccgcggctgcattgtactccgctgccaaactgtgctccgctgccgaactgtactcctctactgcacccaaagcccgtcacggctgcacccgaagtaaaactttccgccacgcattcccgggaatcttgcctcaccgctctgctccggataaagacgtatcagatggacactgttataattgacataagctataaaattcaggtaatgtcctttctccatcttatgtgtgaaggtgatgtagtactcgccgtccatctcctccacattcagcctgtgttccccctccgcccttttcggcgtctgcggcatcagcttccttccgcagcaggaaacctcggcgtcccctgtggccgtcagaatattgccgcagtcagggcagatataaaatttaatccgtttcatatttcctccgtcttcactgttaggttccagttccccctccagtatcttttcaatatttacaccgaggaccgaggagagtgcgccgagaagcgacacatcggggcagcccaggccgcattcccattttgatacggctttatcgctgacatgaagggcctccgccagctgtctctgtgtatatcctttttcttttctcagcgacgatataagcgcccctgatttatcattgtccattccggcttacctcctgtgattctaagtacagcttcagtataaacagtaacggcagatgattcaatcaacgcttcgtagagttgacaatcagcatcatcggacggcgcatctcatccttcatgccggggacactgtcaatcatatgggctggcggctgcggctccacaatattctttatttcaaatccgttcgtaagcaggccgtccagatatgttgtcagcgttttatggtatttcaccacttcctcaccgagaaagttcgctgtcctcttaccctcgtaataatagttgtccaccggaaaatgcagaatctccccatccccgccgtaataccagtcctgggtcccataggccgtaaaaacgggatgctccactgaaaacaggaaactgcccccggctttaaaaaggtattcactttttttgcaatcttatcaaaggattcaatataatgaaatgccagggagctgagggcaatgtcgaagctctccttcggaaactccatatcctccatggcggtgcaccggtactccacctgcggataaggagtcttttccctggccacctcaagcattttgcgggatatgtcaatccctacagcagaagcagctccatgctccatcgcatagatacagtgccagccgtatccgcatcccagatccagcatccgctttccggtaaaatcgggaagcagctcttttaatgtctcccactctccggctccggccagtccctctttggaacggtccatctggctgtatttttcaaaaaacacttcatcgtcgtatttattttctttcatatccggttccgttctccttctgatttttaaattgagactccggcttgcgcagaaccggagccgtcagatcatagctctctcctatcattcttttcacttcctcttcggggattgtaccgtccagaatgatcgagttccagtgcgtcttattgagatgatatgccggtatcaccgccggatacacctgccgccagaaatcacgccattccggactgcattttacattcacccacgtgcggccttcccgctcaaaaatccaggcgaaaaccttccggctcccccggtgtcggattacggtccagttcggatcatggaacggctgatccggataggtgtctttgaatgtcaggcagtaactgataagctcttctctgtttttcatttttccccctgtaaatactctttaaaaaaatgcctgataccaaaatgtaaatccggcatcagacatcctgttttaacttcagttggtattattattccggctggcaatgaggcttacgttgctattcacggcctggttcgcaaaactgcgtttttcagcagggccgtgaatcgtaacacgcttacgcccatcctgccttagttttctcccatcttggcaagcttcgccgcctggtcggctgcaatcaggctgtcaatcagctcattcagctccccgttcatgacagaatcaatcttataaagcgtcagtttaatcctatgctccgtcacacggccctgagggaagttatacgtacgaattttttcggaccggtcgccggtgccaatctggctgcggcgctcctccgcttcctggttctgccttttttccagctccatatcgtagagctttgaacggagcagacggaacgccttctctttgttctgaagctgcgacttctccgtctggctgtaaattacgattccggtcggcatatgggtcagacgcacggccgagtcggtagtattgacgcactgtccgccgttgccggacgcacgcataacgtcgatacggatatccttgtcgtcaattacaacgtcaaattcctccgcttccggcataaccgccacagacgcggtggatgtatggatcctgccgccggattccgtctcaggcacacgctgcacccggtggacgccgctctcatacttcatcttggaatatgcgccctggcctgtcaccatgaacacaacctccttgaaacctccgattccgttctcattgacgctgacaagctccgtcttccagcggttgctctccgcaaaatgcacatacattctgtaaagctccgaggcaaaaagggctgcttcgtcgccgccggcgccggcacggatttccaccatgacgttcttgtcatcattaggatctttgggaagcaggagaatcttcagctgctgctccatttcctcaattctttttttcgcatcggccagttcttccttggccatatcacgcatctcctcgtcagactcttcctcgagcagggccaggctgtcttccacatcctggttcgccttcttatactccttatatgcatccacaaggggagtcaaatccgcctgctccttcatcagtttccggaatctgttctgatccatcgcaacatcagggctgttcagttcttccagcagctcttcatatcggatcagcaaatcatccaatctgtcaaacatggtaacctcctgtatttgtctgcagaattaaatccggactgcagcactgtatccactatctgttccggcgcgccctgaccacgcggtcaagtcccggttcatctttaattgtttctatttcgccaaagccggcagccgtcaaaagctttcccaccgcctccgcctgatcacagccgatttcaaaataaatgaaaccgccttccttcagatatctgccgctctgctgcgccagaatccggtaaaaatacagtccgtcctctgcgccgtccagcgccattctcggttcatggtcctttacctccggctccaggccgtctatcaccgctgacgggatatagggaggattagacacgatgatgtcaaatttttcgtcctgttccaaatttaagaacaaatcactttccagaaggacaaactccttcttccgtactcccggtatcctggcaatccccggggaatacccgttatctgaaacgctttctcccgctgtttcctgttcctgtgcatccccgccctggtagacatacgtacacatcttaagtttccagggtgtgtccgatataagtgtggactctgagcgggcggttcccttctgtacgagaaaatggcgccgtacattctttttggccaccttcagcgccgccttcgaaatatcggccgccgtcaccttatcgtaaccgcccagcacagccagactgacagcaatgcacccggaaccggtacacatgtcaaggacagaaagcgcctgatccttatggtcccttaagaccgtctccaccagcttttccgtatcctgtctgggtatcaggacattctcatccacggtaaattccagtcccataaactcctgattaccgagaatatgctgaatcggaatacgtgatgcccttttttcaagatagtccctgtaaaccggatacgatttctcaagacgctgccggttcacccttcgggtcctgtccatcaggaaatgaacctggtcaatgccaaaggacgcttccagcagataccacgcatccagccccgactccgttacaccggcgtctgaaagacaggttttcccttcctccagtagctgctgccaggtggggccctcctcttctctcagaaatgtactcatagctttgtctccggaaaattctccttcaaatattctttccagtcaaatactgcttccgtcgctgcgatggcaacttcgatcatgctgtcatccggttccgtagtcgtcagtccctgcatccacattcccggacggctgacaagatccataaatttggaattacttctgcctgcgagctggagtatctcataggaaactcctgcaatcaccggaatcagaatgatacggctcagcatcctgagaccgatattatcaatccttattaccataaaaaacaggatgctgattatcatgacaatcaggataaagctggttccgcaccttttatgttctttggaacttgcccggacgttctccacggtaagaggatgtccgtgttccacacagttaatacatttatgctccgctccgtggtacatgaaggttcttctgatatcctccattcttgaaacgagcttgatatatgctataaatatcgcgattctgattacaccctccaggacagccatcacatgctccgatgtgataaatgacttgaaaaagttggctattacaagtgggagtatcataaagatcccgattgccagaataaaagaaagtaccataacaattgacataataacgctttccagtttttctccgaaaacgcggtccagaaacttttcaaatctacccggttcttcttcctcatcatcttcaaaaaagctggcggaatacgtcagagtcttcattcccagtatcatggaatccgcaaaccggaatacgcctctgataaagggcagggacaggatcttcgctttagtggtaatactctcatacttatctttctttatctcaatctcaccgtctggcctgcggactgccaccgcatagtcattccggttcatcatcataatgccctcaatgacggcctgaccgccaattcctgaatatttcattctttatactccgtttaaaagcgggtaaaacctcgctttgtggtctttcaccactaaataacgataacctgcacgctctgcgcacaggtcaccaccttcaataaaaggttgagtttaatgtcgccactaaaactcaacccttacgttgttcaaacttaattgtctgcattcatgccgtacttacggttgaacttgtcaatacgtccacgggctgcagcagctttctgctgacctgtgtagaatgaatggcatttggaacaaacctctacgtggatgtccttctttgtagaacctgttacgaattcgttgccacagttgcaaacaacttttgcctgataataggctggatggattccttctttcatgattttcacctctctgatttttcttgtgcgatttccgaccgctgttttattgctatgttaaagccttgcacatccatgtcctgctggtccatcattatagcagagcatcaatcgtaaggacgactcacgcagatgtcaaaactaccgtctaattgtacagcctaaacagtatatcatatgaagcaagggattgcaaggtttttttagaagaaacgcctcttccgggtaatatccacaaactcctgattatttcttgtttttgcaaacaaatcaaggattctctccaccgattcctccggtttctgggtgttggtcgccttgtggatgatatcgaccgcctcggactcttcctgggtaagcagcagatcatctcttctcgttccggatttaagaatatcgatggcagggaaaatccgcttctccgaaagcttgcggtccagaacaatctccatgtttccggttcccttaaactcctcgtagataacatcgtccatacggcttcccgtatcaatcagagccgtagccagtatcgtcaggctgccgttctccctcatatttctcgccgctccgaagaaacgtttcggcatatggagggccgccggatcaagaccgccggaaagcgttcggccgctgggcggcactacaaggttataagctctggcaagacgggtgatgctgtccaacaggatcataacatcccttccatgttccaccagtcgtttcgctctctcgatgaccatctcggatacacgtttgtggcgatccggaagctcatcaaaggtggaatagataacttccacattcggtcctgtaatggcctccctgatatcggtaacctcctccggccgctcatcaatcagaaggataatcaggtgcatctccggatggttcgccgtaaccgccctggcaacctgctttaacaaggtggttttaccggcctttggcggtgaaacaatcatgcctcgctgtccctttccgattggagagagcagatccatgacacgcatggccgttgtgttccttgttcccggcatctccagatggagacggctgttggggaaaatcggtgtcaggttctcaaagttcggtctgcgctccaccacgttggtaggatagccgttaaccgtattgatatataataaagccgcaaatttttccgtggctgtctttactcttctgcttccccggacgatatcgcctgtctttaagttaaaccgtctgatttgcgacggagccacatagacatcattctcaccgggaaggaaattttcacaccggataaatccaaagccgtccggcataacctccagaattccatccgcttcgataccgctgtcaagctcctggaaatccgtctttccctcttcatttctggactgatactcacccctcgtctgattctcggctctctgctggtaatcacctctggactggctctcgccgcgctgctggtagtctcccctggactggctctcgccgcgctgctggtagtctcccctggactgattatcaccgcgctgctggtagtctcccctggactggttatcgccgcgctgctggtagtctcccctggactggttatcgctgcgctgctggtagtcactcctggactggttatcgctgcgctgctggtagtcgcctctcggctgataatcacgtttacggctgtcgtccctgtaacggttcgtatcacgtctcggcgcttcttctctcttttcttccctggtattttttttcaaaatacgcggttctttatcgatcgtctccgaaggcttctcgtctgtttttttctcttccgccgccgccaaaggctccgacggaataatattgtgtacgccgcctccttctgccccggctgcatccatgccggccaaatctttgtctgctgcttttccaccggctatttcacacagcctgtctataatttctgcttttttaagggtggttacacctttaagcccctgtgcctttgccagttcccgaagctgtgtcaaaggaagggtctgcaatttttctctcatacaactctccttactttgtttagttttaattttgtattggggattattaagaaataagaaacgtcaggaaatacttttcttgtcttcttaattatatactattttatagaaaatgcaatttttttttaaataagacatattaaatccaggattttcgtgcaaaacgcgcacgaaaacaccttgcggaatacaacctgggcaccagtgtcatgatgttggggtcaaaaggtcttttgacccctttgataccggattgcgccgcgcctgcctgattacatctctccctttaaaaaccggagccactcaccgattttcttctcatagccgttatccgacggtctgtaaaaagaggaaccctccaatccgtcgggaagatactgctgttttacatagtggttcggataatcatgggcgtacttgtaatccagaccgcgtcccagcttctccgctcctttgtaatgcctgtcctggagatgaaccggaacctgggccaccgccttgctccggactgccgactccgcttcgtcaattgccatacaggcggcattgctcttgggagcgctcgcaacataagtcacagcctgggaaagtacgatcctggcctccggcatgccgagacgctcaaccgccaaagcggcatttacagctactgaaagcgcctggggatccgcattccccacatcctccgaagcgcagatcatgattcttctggcaataaatttaatatcctcacctgcataaagcatcctggcaagataataaacggctgcatccggatcagagcctctcatgcttttaataaatgcggaaatcgtatcataatggttatcaccgcccttatcataccgcaccgcccgtttctggatacactcctgggccacatccagcgtaatatgaatcagaccgtcctcggaccgctccgttgtcaggattccaagttccaccgcattcagggccgccctggcatcaccgcctgccatatctgcaagaaagtcaaccgcctcctcagagatatcggccttgtagctgcccatccccttctccttatcatagacggcgcgtctcagcaattctgcgacatcttcctttgcaagcggtttcagttcaaaaatccgggaacgcgaaataagagcgccgttgacctcaaaataaggattctccgtcgtcgctccaatcagaagcagagtcccatcctccacaaagggcagcagatagtcctgctggctcttattgaaccggtgaatctcatctacaaaaagaatagtcttctggccgtacatccccagggcatcttttgcctcctgcacaacctcctccatatccttctttcccgcaaccgttgcattcagctgcttgaatctggcgcttgtcgtacctgctatgactttggccagcgtcgtcttgcctgtccccggtgggccgtaaaatataatagagcccagcttatccgccttgatagcccggtaaagcagcttgtcctttccgataatatgcttctgccccaccacctcgtccagcgtggctggccggagcctggaggccagcggagcctccttctccatcgtattgcttctcatatagtcaaataaatccataacatccctctgtctctaatctatcagcaattcatctactgtaacaaaagtatagccctgctttgtcaaagtgtcaatggccgccagcgccgcgtccacagaagttccaaacacatcgtgcagcagtatcacatcatgctttcccacattcttgtatatatgcttcacaaccttctgtgggttctggcttttccagtccagtgtatcaatatcccagaaaaccggggtcattctcaggcattcttccaggtcgtcattccatattccatagggaggcctgatatactcaggcgtctggcccgtaatgtttcttatcagttcattcgtcttgcggatggcattacaggcatcttccgtggttccctttgtcaggtccacatggctgtagcaatgggttccaatcagatgcccgtcttccgacatctgttttaccagctcctcatttcccgggatattctcccctaccagaaaaaaggaggctttcactcccctctccctgagtccctccagcagccgtttcgtatagaccgcatgcggcccgtcgtcaaacgtcagcgccagcagtttttctccatcaccggatttttcttcttttcctgactttttaccatctatatccgtctttcgcttctctttccgggccgattctccctgaccggcagaatcaggctcatccggttcggcagacaccgccaggccggtccatgttccggccgccgcgctgtggtccctgactgccgctaaacagaaacacgccagaaatacatccatcactgttatcaccatcaaaagaaacatttttcttttcacatgcttccccttcctctgtatccgcgccgctgtcccccgcagattgttcccaggccaaacatggttactgttcacaccttgcaaaaaagcggcatgctgtaaacaataacgcgcttctcaggacacatcattgcagatccgttactaataatcaatatatgcagcagctcccaacggcagaattataaacatgcaaaagaaaaagcacggatataaaacaggccgccgaaacgggtcaaaagcctgttttatatccgtgaaatcgtaaattatgccaccagtgcggaaatcccaaaataagataacacaatgattcccagcacaattctgtaataaccaaagaacttgaaatcgtgtttccggatgtagcccatcaggaatttaatagaatataccgacacggcaaaagcaaccgccatgcccaaaagcaggtaaaacacctcataccctttgaatgctccgccttcaataaaaaatttgataattttaagaagacttgctccaaacataacgggtattcccaggaaaaatgagaattccgcagcagcgcccctggaacagcctatcagcatggctcccagaatcgtggctccggaccgggaggttcccggtatcagtgcaagaacctgaaaacagccgattacagccgcggtctggaaggaaatctgcgtcacccgctcaatcggaaatttggaattccggttccggttttccaacagaataaaaaacacaccgtaaataatcagcatggccgacaccacatatccgttcatcagcttattcataaaattatccaaaggcagtccgattacagccgcagggatgcatgcaacaaggatctttccccacagccggagtgttcccctcttctgcgcatctgattttcgtgatgaaaatggattcagtttatgaaaatacagaatcagcaccgccagaatcgcgcctaattgaatgaccaccatgaatacttcccggtacgcctcgctgacctcaagatgaataatttcatctaccaggatcatgtggccggtgctgctgatgggaagccattctgtaaagccttccacaatccccagcacaatcacctttaaaatctctacaaaactcatgcccgttcctttccgctaaatctttccgctaaatattttcaatctgccagtcgacaggttccagaccattcgcttccagatattcattcgtcttactaaaaggcctgctgccgaaaaatcctctgtaagcagacagggggctgggatgcggcgcctccagtatcaggtgcttcggattggtaagcatcggtttcttcatctgagccggtcttccccagagtataaataccatcgggcgatcctgcccggccagaattctgattgccgcgtcggtgaactcctcccagccgatgcccctgtgggaattggcctggtgggcgcgcaccgtcagcaccgtgttgagcagcatcactccctgctcagcccattttttaagatatccgttattcggaataaaacatcccagatcatcatgcagttcctgataaatattcacgagtgaaggcggtatctccacatccggcttcaccgaaaagcacagcccatgggcctgtcccggtccatgatacggatcctgtcccagaatcactaccttgacctttgaaagaggcgtaaagtcaaaggcattgaaaatatcgttggcatcaggatatacagcccgtgtctgatattcctgctttaccgtctcatataattttttataatatggctttttaaactctgcccccagcggtgccagccagtcattactgattgctcccatatgttatctactcctgtccattactttgtctgaaccgttacctgatacggccttctgcatgcgcacaagaccttcttaacaaattttatcacagtaacgcagcattcacaatcatttatcggcacatttcctgataaattccaacgaatcgacagcaaccggcacggcgcggccgcgtatttcttccgatacctgggcaaatttcctgtttacacggtacatgtccgctttccggttaaagtataccgtcttttcaaaaggccatcttatcaccgtcggtgttttaaatccctcccccaattccaggacaagaaggcggtggttcagtgtatgggaaagccactccttatacctgttccatccgggcaaataaccttcctcgatataattttttgcctctatcgtattggcagccagcggtgcgccgcaatgcggacagcgtccttccggcacctctcccctctcccagatatcctttgtgcatgcctcactgcactgaaaccagttcacatttccgcacggggccgtaatcctgtccgccctcagaggactgtcgaaaatccgggcatccgttactgtcgtcacgatgaaatagtctttcccgtctgttaattcatataacgcatgatatgccgcttttgcttcggaatcttttgcttttccccactcacttccaattcctacaaggacatattcacaatctttcaatttttctctcagttgttccacaattttatcattctcgtccatatccgccgctccctccatatttaaacgccaaaagagcccgcagcgtatggagaaatacgccgcagactcttttattgtaatgcattttaagacggattgcaaaattattttaatgtaacttttgcgccttctgcttctaattttgtctttaactcttctgcttcatctttggaaacagcagctttaactaccttcggagctccgtcaactacttctttagcttcttttaagccaaggcctgtagcttcacgaacaactttgataactttaactttgttagcgccaacttctgttaactctacgtcaaattctgtcttctcttctgctgcttctgctgcgccgcctgctgctgcaactacaacgcctgctgctgcggatacaccaaactcttcttcacatgcttttactaagtcgtttaattctaatacggataattctttaatagcttcgataaattcagctgttgttaattttgccattttaatgttcctcctgtaattttactatttaatatttatgcacagcattcctgtgccgtctctgccgcttcaggcagccatataaactgttccgatttgatttcccggatggaaattatgcctctttggactctgcgatctgtttgataacgcgagcaaagtttgtgattggggactgcatgcttccaagcaatcttccgagaagaacttctctggaaggaatcgttgcgataacctgcattcctttagcatcatagtaagtatcctcaacgataccgcccttgatctctaacttgtctgctttctttgcgaattcagctaaaattcttgccggaactgttgcatcatctttcgatacagctaaagctgtaggtccttccagatgcggctctaaagcttcgaatgcagttccctttgcagcaaagcgaatcatggtgttcttataaactttataagtaacgccagcttcccttaactgtttacggagctgtgtatcctgctctacagtcagaccacggtaatcaacgactactgctgtcttagcaccgttgaataattcagaaatttcagctacaaccggctgttttaattcaacttttgccatgaatggtttacctcctatattatttggtaaccgcctgggtaaacggtgaaaggtcctagccgaacctcttaccgccgacaataaaaaacctctttatccatgaagacaaagaggcgtaaacttacacatttaatatggtatgtttcctcggcaggcgtttgcaacttatgccatacggcacctgctgtcttcggcagttaacactagtgtaagatatcataattttcaaggtttgtcaagttttttttacatatcaaaatggagatttaactgaggttgggaggacgcgtccggaacggaccatgtccggtgtggtgagggggatggctgagtcttccgtccccgtgggaagttggttgtggagggggaatccggccggaatgaattgctgcggggaccgtttgcactctttggagtgcgcatcggagtgctaagctcgaaaagacctcgctaagcaccggcggactcccatgtcccctccgcaattgattccgcctacttccccggggcaggttttcaccggggacggaacactcaggcgaaggttttcgcggcaccggacatggtccgttccggccgctgattgtctccaaccttaaatggggaggaccttgtcgcggccactgcgtgtttacggcaggccgatatcaaatcctccacaattttttataaaaggcgtattaaaggcatatcgtattttccgcacacggaagcactgagtggtctcgacaaggtccgcccccgcacttaacgcgtgagacactcagcggccgcaggccagtggacggggccgatacacttggcggagtctttcgtcccggcgaaaaccttccgggagaaggagataccgccgacatcttccggcggagaaggagagaatgatatccggaaggacgttcgcccgagagatgatagctcttaggcagagggagacaaagcgcgccgggcggattttagccctacaagggcaaaatccgggacaacttgagcttcgaactcattcggagttcggagcgaatttgtccgtaaccccaggggctttgccttcctctgtcttagagctatccctcgaagaagcagtccagccggatatcattctctccggctccgccctgcgaaaacaaaaccacagtatctccttctccatccagcgatgccaaacccccgggacgaaagactcatatacacacctcaccaccccgtccgctggccgtaccggcggcgtcctcacctgcttaattaaatctctgaacagtaaccaaacaccgcctaccgcttcattcttctcttatgccggtacatataagcatccgcccgggtcataatatcttttacctccaaatcccggcccggggtatagaatgcgtatccggacgcgatggccgcatggaattcctgcgtgcggctgtactcctccattgctgtttttatccttgcgatgccttccacagcggtttcggcatctttattttcaagataaacggcaaattcgtcccctccgatgcggtataccacttcaccgggaaatgccgtcctgatggcatctgcagcggcgcggatatactcatcccccttatcgtggccaaattcgtcgttcacacactttaaattgtttaaatcacacatgacaaagcccggccggttcccgctgccaaagtcgtcccggagacattccatctttttttcaaaagccagtctgtttccaacgcctgtcaggccgtctctgtcccgctctacctgaagcgctttcgtctgaaggacttcatccgtcacatcttccacaacgcaccttacggtgccatccattatttttttggttatcttaatccattttgagccgtcctccgactccagcctgaatgtgtcgtcgcctccgtcacgcaaattctcaaattctttcaggaactctgtaaatttcatcttatccctggtaaaaatacgttcctgctcccatgtaaggttcagcagactgggaatccggctggtcataaacaccttgcctgaatgcgggcgcaattcaaacacccccagaggaagtcccgacagctccatcagcttagcatgacgggtaaaccacacgctgacaaacaacgcgataatcagtccgatgccagtggttgccaaaagtgcaaaaaccagcagcctctctatcttttgaggaaaatgcagcagaaccggcttctccatcagccccatcaggtaccactcctccccttcaaacggcgtattgtggtaatacattcccatccggctggcactgacataaatatcgtggctgctgttatggttgagcagcctgtatatcccgtcctcctcatcgacgctttccagctccatcatctctccggcttccagcatcctcctttggactgcaccgtacgtgatagacagtttaaggcccttctccattgaaccggtcgcgatgacataaccgtaggaatcggtgttctgcaaatctcttgccggtaaaaaacggtacagataattcacggaaatctcaactccgaatatggcggccacattccccttcccgtcaaaaacaggtactgaataagtgatgacgtcttcatcctggggatttaccttgaacggtgtgctccaatagcccagccaggctgatcggccgtactcatttgccgcctcatagggctttgtataaaaatcccggttgctgctgctgagttccagccggtaactccagtttgccgtagttgcaatcttcagcttgtcggccacgttccacggcccggccagcatataaaggttctcgttattctgtcccgccttatccggattattgttacgaaaatacagggaggccagagaattctccgttccgtcctgccccggcagtatcagaaaagcgcccgtagtctttgtgtggtaaagcgaatccagaatgatgggagccagctcttccaggacttcatcctctttacccgccagattccccgtatccgtctcctcaaaataccggctgatccgttcctcgtcatagtcaaaatttgtccagatgttattcatctcgttttccagattgttcttacgcccgttcaccttctccgaaaatatcctgtactcattttgctctgctctcttgagcacgccgctgccaaccatgattccggccagcagactgctctgaaatgcagcaaaacagacaaacacaacagtcaaacgaaacgcaatattcctgcttctaatttttctccccatctgtcataccagccatttctttgataagagaatcataccagcggtagaagcaatcctcctccagcagatccttttgcacaacatcttctttttccccgtttaatatccttttttccatcagggccagagattcggccgtttttttctccaaagactcccgaagactttattcaattcataagagccgtcaaatgcttttttcgcatagaatgcatactgcctccccgcttccagatatgcattgattccgcttgtaattgccgccgcatttccagtatcgtcaacgttcctgagaagttccggtacggatgaaagcgcctcctgctcaaccggcaggtaacccgtagacaccgcaaacctgatattctgctctggttgtgtgaaccacttcaaaaactcgcaggcagcacgctcgcgcacctcgtctgaagcaaatactcccatattggctccgcgctgggtcatgtatttttccccgttttgaaacacgggatagggaaggcacaggcattcaaccggatatgacttattctcatccttgattacttcgtccggaaaaaatccggcgcctgccgatgagccgatataagcaatcatcttgccgctcttaacgccgtcctgattgtataccctgctttcataccaccccattatatgaggtatgtagtaggcgtcccatactcttctcgccgtctctttggaataaaccggcttcccgctgccggataacacattttcccccagctgcgcagccgtaattacggcaaaatcattatagtaattcatgccgagaaacggctggcctcccgaccattcatagtacatctgagccgtctttgcaagcccctcccaggttccaagaagttccatggaagctcccgtatccgcagaaaaacgttcccagtccgtcttattcagaaacagcagctccgtggatttggccaccggcaccattttgtggaccccggaatgatcccacataccctcttccaaaaattccggacggtatttacccaattcttctcctgtaaaatactcttccagagataccaggggagctatcttatccagccggtatgcactgtcaggataggacgaaaatatatcgggcagcggttccgctccaatcacgcggttcgccgaggcgtacagcacttcctccagctcatcactggagccgtatcctttcgcatcgattattatcccctcattcatcccgaccgtatcgttgaactcctgaaccagtttgtcaaattgcatctttaccactgcattataagaatgccagagcgtaatcaccaccggcgacttcggatcaggcactttttttcctcttttaccgcatccgccaagactgaccaccgttatcaagacgagcgctgctattatcgtatatttacttattcttctcatacatactccaaccaatgcacattagactactctactatataatatgataacagtttaaagcatgaactgttactataatatctcagtataccgtatcatatgccggctgtctattgcaattataaaatatcaaaaaccggaccaaaagcgtatgcttttgatccggctctgtaattgtaaaattctattgcccctgaattagttcacaagcttagcaacatttaatttaacgccaggacccatagtggacgtaagtgtcacactctttaagtaagagccctttaatgcacttggctttgccttcaggatagcgtcgataagcgtctggaagttgtccgctaacatttcttctgtgaaagaagcttttcctactggcacgtggataatatttgttttatcaagtctgtactcaatcttaccagctttgatatcgttgatagcctttgttacgtccatagtaactgtaccggctttcgggttaggcattaagcccttcggtccgagtacacgtcctaaacgaccaacaacacccatcatatcaggtgtagcaacaactacgtcgaaatccaaccatccttcattctggatcttcgggatgagttcctcagcgcctacaaagtctgcgcctgcagcctgagcctcgtcagccttcggtccttttgcaaatacaaggattcttactgtcttgcctgttccgtgcggtaaaactacggcaccacggatctgctgatcagcatgacgtccatcacatccggttctgatatgagcttcaattgtttcatcaaatttagcaacagatgctttctttacgatagaaatagcttctgcagcgtcataaagatttgtgcggtctactaatttagcagcctctacgtatctttttcctcttttcattataaataacctcctagtggtattgtcggggatttccctcccacgttacaaataaacatctcgaattcacttcttcagcgtgcgtccgttcatccaggccctaacttctccgcccggataatgaaaccgcttcgcattaagccaaaaagtgtcctgattaactgctttcggcttactctactgtgattcccatacttctggctgtacctgcgatcatgctcatagcagcctcaaggcttgcagcatttaaatctggcatcttcagctctgcgatcttctgaagttcttctttagagatggtagctacttttgtcttgttaggtgttgcagatccggatttgatcttgcatgccttctttaacaaaactgcagccggcggagtctttgtaataaagctgaagcttctgtcagcgtatacagtgataacaaccggaataaccaggtcgccctgatctgctgttcttgcgttaaattcttttgtgaactgaacgatattaacgccgtgctgaccgagagccggtccaactggcggtgctggtgtagctttaccagcaggaatctgtaatttgatatatcctgtaactttctttgccatgataaggcacctcctaaataaatgtggtaattgcgggaatctccctcccacgagcctctaaaccggttaaaggccgttttattacatcttctttacttccgtgaagttaagttctaccggtgtctcacggccgaacatctccacattgatagtaagggtctgctttccttcgttgatggacttgataacaccaacggtatctttccaggcccctgcggtaacaacaactgtgtcaccttcttcaaattcgacaaccaatccggcttccctgaacccgagagcatccatctctgcttccgtaagaggaaccggcttggaacccggaccaacaaatcctgttacacctcgggtgttgcgtactacataccatgtgtcatcgttcataaccatgttaatcagtacatatccgggaaacatctttttggcaacctgtttctgagccccgttcttcagttcgataacgtcctgcatcggcacggacacttctaaaatctgatcctgaagctttctgttttcaattgtcttttcgatgtcaacttttactttgttctcgtagccggaataagtatgcactacataccaatttgcttctgacatattctcacccttgcccttattttagataacaaaatgcagaccggttacgataatcgtatcaagcgctgcaataatcagtcccaaagcaatggcaaccgcaacaacagctcctgtctgctttgcaacagtttctttgtcgggccagatgattttcttgtactcggcctgaaggcctttccaatagctctttttaggagcctttttggtattttctgtttcacccataatttgtcctccaattgtctcaggcagccgcctgaaaccaggtacaatcagttaccttattttgtttctttgtgtaacgtatgtgttttacagaatctgcaatacttctttgtttccattctgtcaggatgagtcttcttatccttagtcatgttgtaattacgttgtttgcattctgtacatgccagtgtaattcttgtgcgcacgacttccacctccacttaaattgttgtttgtcacagcctttattttactgcatttatcaaggtttcggccctgattttgagcataaaaaaaagacctaagttcttccattcgcccgtctactatatcataaaagctttatttcgtcaatatattttttaaatcaccgcacaccagacaggaatcgtaatcatggacaacagggtggacagcacaacgcacttggtggcaaactcagcatcgcttccatatcttgccgcaaaaatggccgccgtcgccccggccggcatgccggtcattatgaccgcaactccggcagccacggaatcaagccccagcagccggcttaacgccaatgcggcgccaggaagaagcaccagcctgaagatcccaaaaccggccgttgttttattaattatcgtcctcacatccacatctgccagaatcgtgccgataataaacattgtgactgctgaattgcaatttccgatactccggacggaagaggccagcacttccggcacgtgaatctgcgtaaacatcagaaacatgccgagatacacggctacaaggcagggatgggtcaggatattacgtaataccttctttttatctgtgccgcccgatatgaaatacgatgttccggccgaccacataaccacacgcatcggaatgagaaatatggatgcatacagaagtcccagttccccatagaccccctccgccacaggattgcccagaaaaccgccatttgacacaatcgtacagtattggagtactttcttctgatgttcctcaaagccgttgaacaaaaagcggttgagaaagacgcacaagaactgcatgacgattccgaccgccagcagcaggccgcaggccttcataatcgatatgtcaaactcaatcaggcatgatttaacaatattgcagggaatgatgatatttacacagagatccgtaagacaccgcttacccggctcgtcaataatccccttccgttttaatacagcccctgccagaatcataatgaagaggctcccctgcagattgaacagtttgataagctccatgattcatcctccttcaccgtttaatttacaagaccatccggctttatcctattcatcctccttctgctgcatagcatgttccatgcaggcagcagatacagataaaatgccgtcaggatacagccggccgtctccggtgccgagatagcggcaagcggcacggcgcaggcgatggaccacgggaccaggggagccacgataacggctgaattttccagataaatcgccagttcctttttatcatctgtgatatccttacagagctggtaggtcaaaataattcccagcgtctggttgcaggccgccatcgaggccgggagcgaagtcaggagcgccccgccgtatggcgtgacccgttctccaagccggccgattttcttctttataccaaacagaatccccgtcttttccaatatgcaggaaaacgaagaagagatgcatacaatcaagctgacctttaccatagaaaggatccctcccccgttcatcatgaccgctaattccggctccggaacacggtaaccgaagattagaaagcgcaggagttcctccggggtatttccctgcacagacaggcagataaaggacgccgccaggatgctggccatcattgtacgcttgacattgattctgcacagggacaagataataacaagtgcggcaggcagagccgtaacccagtgaagtttgaagctgcctctcaaaagggagagctggactgaatcaaataagctccctgcgctgttcagtcccatcagcagataaaggacgcagacggcggcaaacgggacgacggaagtctttaccatattctttatattgtcaaaaatatcggtttctgtcagctcactgactaacagggcgctggtggacatcggggaacaccgatcgccaaaaaatattccggataatatggcccctccggtgtaaacgggattcatccccgcccctgcggccatagccatacatattacgccgctggtggctgccgtcccaaatgcagtcccggtcaaaactgaaacaaggcagtttaataaaaacacgacaagaaagaatgcagaaggtacaatcagccccgcagaaaacgtgacgagaagcggtatcgtacccgccgcacgccatacggcggtcagcattcctatcagcataaaaacaatcagtatatttttcacggtatttattccctgcagggacatttgggcgatctccgcagccgtataatgctttttaaatgcatatcccgcaaaaagaatgtatccgaaaatcagagcatacagcactgatattccaagcgccgcgcataacagaagcgccgccgaaaaggctccgagcacgatcagttccaacatatcacaacctccctatgctttatagtataaagtaattattcaaattgtccaactgttctttcaccgtttctgttcttatcttgttactgtttacagttcagggtaagttagataaaactatggagatttaactgaggtttggaggacgcgtccggaacggaccatgtccggtgtggtgaggggggctggctgggtcttccgtcccttgggtaggttggtcgtgaagggggaatccggccggaatgaattgctgcggggaccgtttgcactctttggagtgcgcagcagtgctaagctcgtgagaaacctcgctaagcaccggcggactcccatgtcccctccgcaattgattccgcctacttccccggttcaggttatcgcagggacggaagactcaggcggaagtttttgcggcaccggacatggtccgttccgggcgctgattgtctccaaccttaaatggggaggaccctgtcgcggccactacgtgtttctggcaggccgatatcaaatcctccacattttttataaaaggcgtattgaaggcatatcgtatttcccacgcacggtagcactgagtggcctcgacaaggtccgcccccgcacttaacgcgtgagacactcagcggccgcaggccagcggacggggccgatacacccggcggagtctttcgttccggcgaaaaccttccgggagaaggagatactgccgacatcttccggcggagaaggagagaatgatatccggaaggacgttcgcccgagagatgatagctcttaggcagagggagacaaagcgcgccgggcggattttagccctacaagggcaaaatccgggacaacttgagcttcgaactcattcggagttcggagcgaatttgtccgtaaccccggggggctttgccttcctctgtcttagagctatccctcgaagaagcagtccagccggatatcattctctccggctccgccctgcgaaaacaaaaccacagtatctccttctccagccagcgatgccaaacccccgggacgaaagactcatatacacacccaaccaccccgtccgctgaccgttccggacgcgtcctcacacactttacattcaacaaaaaagaatcccgcgagcaggattctcttttgctgacaaactatatttttcacatcgggagttcaagtgcaaagccatgaatttcacggatcggcgactttgccggcgctctgtgcttcaattttcactgctgttctcttttctgattttcattaccgaaaataaatataatccggacatggccaatgcaatcatcgaagccggagcactctgcgcattcgagataagcgtattgataacacctgtcgcatccagcgctatcatgagaattccgaaaacgaacgccgcctttgtcccggcgcccggcttacagcatttaagccccacgaaagcggcgatgccgcggaaaaccgactctgcaatcgcaaccgcagcgagtgcaatagtcgctccaatcattgattcatactccgtcccattcagggaactgcttcccgccgccaggatgacccccgatataatcgtgagtaccgcctgcgccagaattacgatcgacgaaaactttaatattgttcggctgttcaattccttctgtcctccattgtctgtaatatgaatccgtaatcaccagagcatgtttgataattcgtccccgccatctgcacgccctagtcaaaaaaaccgtccccggatgttctgcaacaccgtcttcatcaatataaatcccattcacccgcttgtcccgcaccatggctcccagtttatccacataataaaggtcgccaatccagctgtttcttgcgagggaaccgtctttgttgaaataataccagtcttcccggaattcaatccattcatccgacgccattgctcccgagctgtggaaataatactgaacatcgtcgataaccataggcccggcggccatatagccggtatccttgaaatagtaccataccccgtttatctctttccaggccgaggccgggaaactcccgtcatcctcctgaaaccaccagccaaatttatcctgtatccaatcagcctgtacagggacagggcgaatcaggacaatcataacagcagtcagaacagaaagtaataactttctcaccgctcttcccttcataattggccttcacctcctgaattctgtccggaacctaaataccattaaatgttaagctgataaaatgccgcatcgagccagcggccgaacttgcggccgacttctctcgtaatgccgcagaattggaagccgaacttctcatgcaggcggatactggccgcattatcggctgtgattacagagataatggcatgcacctctccattctccttcgcaatgcgaagcagctcctccatcagagcatcgccaatcttcctgcccctgtattcatgatccacatacactgagagctccacagtggccgcataggcatcattatcgcggtaaacagagaggctggcatatccaacggcccttttgtcctcctccgccacgataagcgggaagcggccgcggtcgtgctgctcaaaccagacggttctctcctccagtgaccttggcctgattgaaaatgacgcggtgccatttaagacttcataattgaaaatatcaacgaggctctgtaaatcgctcttttctgcccaccgtattatcattctgctcattcctttttataaatccgtatgatctgcctcagccgccgttacaatctccggttccggtacagcttccgcctccgggccgcttaccgccgctgaatccgaagctgcctccggcccggtttctgcatcttttgtccctgccgcctgcgcatcttcttcctcttcctcatcttctgcatttgcggccatcgctgccataatgtgggccatcttaccaatcttgcccatattgctggtatctaccggctcgatttcctccgcatcctcttccgaatcagaagcataaccgtccccgcctgcctgtggcgtattcccgctgtactccgctgaatcttcttcaggctgctccggtgtttcctctattttctcgtacttctccggattttctttggcatccgctatcttctcttccataaacgccatgaattcatccatctcttcccggctgccgaaagcagattttgcaacaaactgccatgtcttgtcattggcctccagaagaaacagcctctcaatctccaagataccggaaagctcattataacggtattccttcgtcacattctcagacggtacgttcataacaatgccaaactctccgagggataaatgcacaaccggaaagttgttggctttctcaagcctcttaagcccgctcttcttccaaatcaggcgttcctgattgtgatgagaggtcgtataaaacatcgccgctcccacgataagcgccattcccaaagacggtatcaccgccgccggattgcctttggccgaactgatgctgccgccgacataaataacaacaaatgcgacatagataaccagagtgaacagcttcatttttttcgattcattgcgtagcacgttccagtgtatccagtttttgtaatcgtcctttaccagttgatactctaattcacgcatctttataaactccttttcgtccctttaatattcgcatagctgtatgcatatccgggaaactcgtaacagttcagacagcataaactgttacggaaactcctctgttcccctattttaatataatatcctactttattgtccctgtccaatacaaacggcaaaaaaatagacgttttttactccggctgctttgagcgccctggtgcatgcctccgccgtactgcctgttgtatagatatcatcgactaaaatgactcgttcaagaccgggcgggattttctccgctgtaaacgccttctccagattcttcaggcgggcagaggggcccagctccttctgcggttccgtattcctgctccgcttcagaatatcagagcagaccggaattcccgtcttttcccccagcttctgcgccagaaccagggcctggttaaatcctctgctcctgtatcttttaggatgaaccgggaccggtatcagacagtctgccctcatcgcctcaaattcactgcccagccgtctaaccgcttcgtcggcgtagaaatcgagatattcccgtctgttcttgtatttaacagccgccatggaggctcctgccgcttcattataattgagcagtgcaatgccgtattcaaagctgcgccggtggcgggtgcagtcaaaacaatactcttgatattcactcaatatttctttaccgcactttttacatacaggggattttacaaaagaaagcctgccctgacagccggggcagataagcttccccggggcattacgatgtctccgcagacagggcatcgtcttggaaagagggcgtctaagaacagggacgccgctcgtttatattccattttcaaattatcagctcctcaatacgggcctttaagcccgaatagcgcttctgttccattgcattatccaccatctgctggaaaacctgcggtattcctaccaggcagacacaggagcgcgctctcgtcacagccgtataaatcaggttccttgtcatcagcattctgggtccgctgtataccggaatcacgacggccggatactcacttccctgggatttgtggattgtgatggcataggccagttccagctcttccagctgccggaagctgtaatccacaagcttcccctcatcaaattccacggtaaggagttcggcgaacagattaatctcgcgtataactcccgtatcgccgttaaacactcccgttcccttgtcaatcggaattccgtaccggttacagagcctccattcgatctgatagttattctttatctgcataaccttgtcacccagacggaaaagcgttcctgccgcctctttctccggcttatccggggacggaggatttaaaaagtcctgaagaatcgtattcagccgatcgactcccaaagctcccttccgcataggtgtcataatctggatatcaaacacatccgcattgacataggccggcagtttttctttcaccagcgtaatcattgcattgatgatggaattcggctcttcgcgccggataaacaaaaaatccctgctcctctttgcgagatccactttttctccggcattgattttatgggcgttgactataatatcgctctgcgctgcctgccggaatatccttgtcagctttaccacatgaaaacactctgagtcaatcatatccctcagcacattgcccgggcctacgctcggaagctgatccacatcgcccaccagaatcagcctcgtccctacattcaccgcttttaagagagcatgtaacagatggatatcaaccatggacatctcatcaataataatcacatcggcatccagcggattttcctcgttacgctcaaaatgcattcctgagttctggttcttttcattcggttccggcattccgctcagctccagaaggcggtggattgtcctggcctcgtatccggtggcctccgtcatacgcttagccgccctgcccgtcggcgcagccagaagaatctccatatctcccatctcaaagtaccggataattgtgttaatggtcgtcgtctttccggtaccgggcctcccgtgatgataagaagcccgcagttgaccgcttcaattacagcctgaatctgcagttcatccagctctatcttctcctgctcctgaatctgcgccaggcttttccggatctgttcctccggctctgagccggtgatatttaaatcatggagcatctttgccgcattcagttccgtatagtagtattgggccgcatagacgccccgccggataagcggttcatcccctccggcagcatccggaaccggcagtccgccgccatttactccctgtccggcagcatccagattcttgacgacaagacgtttgtccatctgcatgtccatcaggtgcttttcaatcgcctcaggctccaccttcagaagctccgaggcctgcgcctccagttcttcctccggcagatatgtatggccgtttgccgaggcctgtagaagtgtatacaaaataccgcttttaatacgaaagtcagaatccgtaaagattccgacttttgatgcaatttcatcggccatcttaaaaccgacacccggtatatcgtccgccagcttatacggattcgttttaatcacattgtacatggccggtccgtattcctggtagattttcacggagagattcatggaaatgccgtaattttgcaggaacatcatcgcctggcgcatgtcctttttctccccgacctgctcccgattgccatcgccatcttctcgctgattcctttaatctcggccagccgttccggctcttcctccataatcctgaatgtatccgtcttgaattttttcactatccttgtagccaaagcagccccgatgcctttgatggcaccggagcctaaatatcgttccatggagacagtgtcttccggctctttaagctcatagctctccaccgcaagctgctccccgtaaatcggatgttcggtcatgcggcctgccgcttccaccagttccccttccgaaatataagagaaattgccgaccagaatatattcttccccgtcgtcggcgccggtaacgcttaaaaccgaataaccgttgtcttcattacggtatttaattttctcaacatagccttttactgctgccatagattcatcccaaatattagtcgtaattctttggtgacagttccccgtgggcaaattcgataaacttgccggtgccgattgccactgccgtcagcgggtcttctgcaatcattgtggtaatgccggtcttctcttcaatcagcgcgtccagtccgcttaagagggaacctcccccgtcaggacgataccgcggtcaaagatatcggcggcaagctccggaggcgttctttcaagtacattgtggacggcatcaacaatctgcatcgcaggctctctcagcgcttccagcgtctcatcggaagtaaccacaatcgtctttggaagacccgtcaccaggttacgtccgcgcacttccatcgtgattacctccggccttctgtatgcagcgccgatattaatcttaatctcctccgccgttctctcaccaatcagcagattatgttttttacgcatataacgtaccagcgcttcatcaaaatcatcgccggccactttaatcgatgtacttactaccgtgcctcccagggagataaccgcaatatcggccgtacctcctccgatatctacaatcatgttaccgcatgccttggcaatatcaatcccggctccaatggcagccgctacaggctcttcaataatggaaacctctctggctcccgcctgcagagtcgcatcttcaacggcctttctctccacctcggtggcaccgcttgggatgcagacgctgattctcggttttctgagcgtcttcttgccaactgctttattaataaaatacttcagcatcttctctgtcactgtataatcggagataacaccctggcgcagcggacgtaccgccacaatgttgcccggagttcttccgatcataagacgcgcttcttcgccaatggccataatcttgtttgtatcacggtcaatggctacgaccgacggttcttttaagactacgcctttacccttaatatatacaaggatactggctgtgccaagatcgataccaatgtcgttggacatcatcatacttgtttttcctcctgatctgtattctatccttttatcattcttatttcgtgcatcaaaaacaaaaatagcgccccatatcattcaggcagactataccgattactattatatacaatttcgttctgttttcaaagggttttttatttttttattatgtttatgctttttttatgtacggtacatacttctgtcacaaataccccctataatacaagtatgttatccgaaaggatgacaggcctttgtttcaagtattgcttgaaataataaagctttttcatactcataccggacggcgaaagtcgtccggcccccctaagcaattatccgcttcgagtccgtcggagcgttttttttgcggtaaccctcacatttcacgtcatagccgatcttttacttatcattcatttcttcaccgcccaccagaaccattcctgcggcagttcaaatataacgacaattcccaaaacgattgcaattgcaaccttcaccgcctcatatccggtatagacggccagtctgagctgctccgtaatcagataatacacggtccaatagattccggcgcctggaacaagggaaagatgcccgatataagaaaaatagtggccggacacttctgtctcactgccgcagccctggaaaggaaaattacaaccattgtagctgtaaaagcggccgatgcgggactccacatgggcgacaactgtgaatagacagcccagccggcccctccgatgataccgcaccacggataataggtacgcggcactccaaagagcagggaaaaggcgacggttcccaccattgcggcacagatttgtaaaaccagttccagaattattccatccatcccaccagacctcccgtcccccaccggatgacggagaatcccactcctacaccgatggcaatacaaaagaaaatcagcagggcatccagcatacgtaccgaaccggaaatgtagtcaccgtccgcaatatctcttatggcatttgtaaacggcactccgggtaccaatggcataatggagcctattaccacgtaattcagatgctctcccgcccccgaaagatacatcaggctgcaaataatggtaaccagggagcctcctgatatatttccgataatttttgaaaaatgagggccgctcacatacaggatgtaggcatacagcgcaacccctgcagcaaatgccgccgcactgtctcccgcgcttccgccaaacagatagcaaaaggcagcgctgccgcagcccgacgccaaaatctgcatcgtttttgtctttccgggcatctgtctgattgcgtttaagcgttctgccgcctccgcaggcgaataccgtccctcctcaatttctctggaaagctgatttacagcggccacccggttcaggtgggtgccgctcaccgggatatgttccacttttgcaaaaaaggattccttactgctccctgctgttgcaaaaattccatttgacagcacaaaggtactgcctgactccaccccgtaatatcggaaaatccgctccatcgtttcttccaccctggaaatctcagctccattttccaaaagcagatgtccggcctggattgccgcttccataacctccttctccctgttctcctccacttttttcttctcctttcttcccctcacaactgtaatttcccattttccgggtcatagcacaggttactgctgccggtcaatcatccctgtgatacagcgcatttcaaaacattgccgaatagtttattctttttcaataatttttaggttttttttatggaatgtccatactttcaacataatttactggcataataaatacatgaaagttattaaactttttcatactcaaccgaacgggcaacaccgttcggcccccttaagccaatttcttttttatatatacctaccattcccaattaagaaaagcagacctccatcgggtaacaccgatggaggttctgctttttggcttattccggtgcgcattcggactttgcataattttcatctcttaaattggcctctacccagacgaagtaattatcatcatagaggtagccgtatacattccagtcatctccccacacccaaagctcgtcattataatcttccggatctgaataagggagaaggcgtacctgcgcctccagttcctccaaaatcacactttttacggaatctgaatcatccatcacctccgccatctttaaaacagcatcacagacaaattcaatgtcactgtcggtcacgtaaaaataatgcacctgccccgtagccgtatcataattgacttccgttatacaggcgctgtccgtaccggcgctgccgataaagtagctggtcccggaagcatagcaggtttcttccctgccgtcgccgtatatatatttccagttatcggtaaaattctccgataccaccggtgtttcatagccggccagaaactcttccattgcttttttggcagtttcggccgtaaggccggaatgcagataccagccgcaggctgtcccggctgattttgcctcctcttcgctgatttcgatctcctgatactgcccgatatccccgtcctcccacagttcttcctgcgtaagccactcctcccggaaaaatatgtcccctgaaatcccctgacccgtcatgtttatttttacggatatccatacaaacagacagaaggcggcggctatggttgtcatgactaccgacacggggaggggattctttttggaagagggctggtaaagaggaccgggccgtgattttttgacgaccggcggcggttccttcggtgtcctggcctcatctgcgtcataaaaagcgggtttgctgcgcctgctttcattcaggttgaaatttcggttctcatatctgggctcccacacgattttcttacaaatccggcagtagttaccggacagaagctccgagtcgcagacgggacaaattttctttttcatccttcctctcctttgcagcaaagcacaggaaagctcctgcatccttttactgtattttcaggctccactcactgcagtcccataccctggtcgcaaaattctcgtagaaatccggttcgtggcagatcagaacaatattacccttgtattccgtcagggcgcgtttcagctcttctttagcctccacatccagatggttcgtcggctcgtcaagaagcagaaggtttgtctccctgttaatcagtttacataaccttaccttcgcctgctcccctccgctcagcaccctcacctggctttcgatatgtttcgtagtcaggccgcatttcgccagggcggaacggacctggtactgggtatatccgggaaactccttccaaatctcctcaatacaggtcgtggtatttcccgggccatctcctgctcaaaatatccgatacagagataatcccccaatgtgaccttgccctctaaggacggtatcaggccgagtatgctctttaacagtgtcgtcttgccgattccgttggcgcctgtcaggacaatcttctccccccgctccatatataaatcaagaggttttgaaagcggttcatcatatccaatcaccaggccctccgtctcaaagatacactttccggctgtcctggcctcctggaaatggaactccggcttcggcttttccctggccagctcaatcacgtccatcttatccagctttttctggcgcgacattgccatatttctggtcgccacccttgccttgtttctggcaacgaaatcctgaagctgggaaatctcctgctgctgtttcttgtaggcagcctccagctgggattttttcacctcatatacttcctggaatttgtcataatccccgacataccggtcgaggcgctgattctccatatggtaaataatattgattacactgtttaagaacggaatgtcatgggaaatcagaataaacgcgttctcatactcctggaggtagcgtttcagccattcaatatgctgcacgtccagatagttggtaggctcatccaaaagcaggatatccggcttctcaagaaggagctttcctaacagcaccttggttctctggcctccgctcagatccgtgacatccttgtcaagtccaatgtcagcaaggcccagggcgcgcccgacttcctccaccttcgcatcaatcgtatagaaatcatggttcatcagaagatcctggatcgttcccagttcttccatcatcgcattcatctcatcctccggtgcatcccccagatgatcgcagatggcattcatttgctcctccagttcaaacaggaatgcaaaagcactctttaatacgtcccggattgtcatccctttttccagaaccgtgtgctgatccagataaccgatgcgtacccgtttcgcccactccactttcccctcatccggctgcagcttgccggttataatgttcatgaatgtggactttccctccccattagcaccgatcagtccgatatgctcccctttcagcagacggaaggacacattctgaaaaatggccctgtcgccaaagccatggcttaaattttctacgtttaaaatactcattgtaaaatatctccttgattacttctatacacagccgtttttccattaaatgcagtgccggcctgcgttttatctttaaaattatttccaacatcattctacatgacaaatcggactgtggcaagtaaaagcagatttatatcggggaatgggggataagaaggtgaggacgacgccggtacggacggcggacgggatgatgggatggtgggatggttttatgagtctttcgtcccgggggaagattgccgcggtgtggggcggagggaagactccgccagctccctcaccaaaccggacatggtccgttccggacgcgtcctccgggcctcagttaaatctccaacatcctaataccatctcaccatagacagctcattatttacgccttttgacaccagaatctggtgcagatcaataatcccgttatgaaatgtcgcagcacaggagcagaggtacagctcccacatcctggcaaacttttcatcgaacatctcctttacctcatcgatatgctcccggtaattctgttcccagcagcgcagggttttattataatgaaggcgcagattttccacatccagcgtgtgaaaattgtcctcagacaggcagtagagcatttcccgcaggcttggtacaacaccgcccggaaaaatgtatttttttatccagggatctcccggatattctttcagtccgctgataaagtggagaaggaacaggccgcccggctttaatacgctgttcacgcagtctgtgaaaagctggtaattgcctctgcccacatgttccaccattcccacgctgaccgcccggtcgaaggtcaggccggtctcaggcagttcccggtagtctaaaagctttacggtcagcagatcctccaggccttcctccctgattctccgggaaaattcccggtactgctcttcgctgagtgtaatcccggttcctttcacacggtatttctttgccgcccggatcagcaggtagccccacccgcagccaatatcaacaagactcatgccctccttcaggcaaagcttgctcaggatataatccactttattctcctgagcctgtctcagggaatcattttcattcctgaaatatccgcaggaataactcatcgtctcatccagccacaatttatagaaatcgttgccgatgtcataatggctcgtcacctctgtcttctggtttttcttcgacagcgtcggataaagcaattttttcaatccttttctgtcggtggaaaatttgcccatctgacccaggaactgatccagcgcgtgatagagatctccttcgatatcgagcttcccttccatgtacgcctctccgagagccagagacgtgctggatgcaagatttgtgaggggaatcggatgtttgatgcgcactgtaaattccggcgctccctcccctatgttaaattcctttccatccatcgttatctgaaacggatgctctgcaaaacgtttcataaaatttatcattacattttcttcaagttccctgaccataatatagcccacctttctttcctgttcctttttcttacagtttttccaggtaaaaaatttttattcgcaagcggcgttttcgctgtttttttgccgtttctgtgcatcatttgttacggtttagccgaaggctgaactgtaacgaatattttaagaagttccccccttgaatttatggcagaaattatatatgatagaacaaattctttgctttgtcatcttatgacataaatcttcattttttacgcgcagaatttatctgcgccagtaaaaatgcccgccaaaccgggctgaaaccgagggagaaattatgtatacttacaactggtaccaatggctggccttcttctatatatattgtttttttggctggattttcgaatcaacttatgtatcattgaaacaaaaacattttgtaaaccgggggtttctgcgtctccccatgctgccgctttatggctccggggccgtgatgatgctgtgggtttccctgcctgtcaaaaataatctgtttcttgtgtatatctcgggcgtaatcgcggctactgcccttgaatacgtgacaggctatgtgatggagcagcttttcaaagtccgttactgggattacagcagccagaaattccaggtacacggatacatctgcctctcctcctcgattgcctggggatttcttaccatcctgatgacggagattatacatgaacctgtggcaggtgttgtgctgaactttaatcagaatatactcctcttctgtgtctttatcgtatcaatcctgtttacggccgacgcgtacgaatccgtcaaagaggctctggctctcggcaagtccctggaggccatgacaaaactaaaggaagagatggaagatttacagtcccgtatttccgctctgaaggaggaagcggcggaacacgtctctgccgtcaaagaggggacggcagagcggattgtcaactcgctccttggaacggccgaactgttagccaatgcaaaagaggagacagcggaacggctggctgctgccaaagaaggtacggcggaaaaactggcagccgccaaagaaggtacggcggaacggctggcagccgccaaagaaggtacctcagagagactggcagccgctaaggaaggaacctccgagcggatcgctgccgtccgcgaaagtacgcgtgagaagctggctctgctcacgggtcagcttgatgaaattatggataaacgccataaactgctgtctgaaaataaattccggcatttctaccgcaggagcctgctcagaggcaacccgggagccgtctccaccagattctctgctgcgcttaaagagttgaaggaacagcttgaggaactgaatcattagaatttataaaggtgagggcggcgcctgggcgtccaatgtattgagcggaattaaggccggaagaatattaccggttttagttccgctcaatttgctgtgatatttaaattttcagtctcatctgtccggagcggagcaggtgcggtgtgcgacaaccttcgcctgagtcttcctggcgacgtccacttccaccagcgtaagagcaagacccagcggaatcaggcatgaccatattccggcaacctgccactcatttaccgcaaaaaagcctcccagcactccgatttgaaatgacataagtgtaatgccgtaaaatccggccttttctttctgttttgcatccttcgtctgtatatagtcggcaatggacagaaccatctgtttcaggttgtttgttgaaaaggtggtggcgctgctgtatcccctggctccggcaaaaacgccccactggaatgccgtaattgcaaaaatagggtaaagcgccaatatattgttcatatcctccggcagaaaaccggccagaacaatgcctgtaatttctacccagatacagattcgcctcatatctccttttacatattttggcagcaggtatgccgcgatcatggagataataaaaataatcagcgcaatgattcggatgaccatctcctgccagctaccgccaaaccatcctgtggccaggtaaatcagattacccgtctgtgccgagccaaagttcccgcctcgcagcagaatggtatatacgcctaaaaagcctcctatatatgacataatataatgtaatgcagtttccattttacctttccttatcaagaataattaatggcaactgttcacagccctgccaaaaaacgcagttctataagcagtaacaattattgtttttattataataccacattgacgaatttatttaaaatacatataatatagctattatcatatagaaaaggtatcgtaaaatggaacttagaacgttaaaatactttcttaccgttgcttcggaacttaatattacaaaggcagcgcgcaagctgaacatctcccagccgccgctgagccgtcagctaagccttctggaggaagagcttggggtgcagcttttcgtccgcgggaagcgcaggatccaactgaccgaagaaggaaaatatctggcgcagcaggcggagcatatcctgaatctggcggaacacaccgcgcagcaattggaggaaatgaaacagcagaccgtaaaggggactctgctgctaggcgtcaccgagacatgcagcgccagcgtacttccggccattctgcccgattttaagactttctacccccagatcagctatgatatctggtgcggcaacagcaatgacgtctgccggcgcattaaagagggaatcactgatatcggcatcatacgggcccctctagatgagcagaattttgaaaccgtgtttttgaaaacagaaacatggattgcaatcgtcagcagacagcatcctctggccgggcagaccggcgtctccctggaacggctgagccgggaaccgctgttcatcccttcccgccagccgctccaaagtgagattctgaactggttcagttcggcctccgaaagctatcagattttcgccctgtacaaccagcttgccgggattatccctctaatcgcacaaaatacaggagtagccatctgcccggaatcagtcaagctgtatacggacgaccggcgcctggcctatctgaaaatcactgaacctgaaccgacgtcccatctctatatgatatgcgggcgcaaccggctcctatccgccggggcaaaagccttctggaattacgtaaaactgtcctttgacacaacggctccgtcttcagaaaaccggtaaaaggtcctttccggaattgcattggaataaatggatataataaactttatttcaatcctttatttcaatcaatttcaggaaggccggtacaatatgaaaaagaatacttgcgaagaaccaatatcggtatggagcgacaccaccactccattaaaatttgacactttaaaaagagatataaaaacagaagtcctgatcataggcggcggtctggccggtgtactttgcgcctatatgctgggacaggccggtgttgattatgtgctggccgaagcggatactgtctgcagcggaattacaaaaaataccaccgcgaaaatcacctcccagcatgggctgatatatcataagctcatcaggcagttcggaactgaaaaagcagcgctgtaccttcacagtaatcaggaagcgctggaaaaatacgtgcagctttgtgagggaatcgattgtgattttgagaaaaaagacgcctatgtgtattcccgtgattcaaaacaggagcttctcgacgaactggatgcactgcaaaaactgaattttccggcagacttggcagaggaactcccgcttcctttccccacggccggagcagtcagatttccggatcaggctcagttccatcccctcaaattcgtacgcgcaatcgccggggatttgaatatttacgaacacaccagggtcagggaactggcaggatgtgaggcgcgcacggatacagggattatccgggcggaaaaaataattgtggcaacgcatttcccctttattaataagcacggcagttatttcttaaaaatgtatcagcaccgttcctatgtgactgcacttgaaaatgcaccggatttgaacggcatgtatgtcgaccacgcacaggacggaatgtcctttcgcaattataacggcctgctgctgctcggggcggagggcaccgcaccggaaaaacgggaggcaactggcaggagctgaaccggtttgcggctcagtactatcccaaagcggcccagcgctgccgctgggccacccaggactgcatgactctggacagcgttccctatatcggcaattactctaaaagcacgccaaatctctatgtggcaacaggctttaacaaatggggcatgacctcctccatggtcagtgccatgctgcttgccggcctggtgaggggagaagaaaatccgtatgccgcagtatattcaccttcgagaagcatactcagaccacagttagcggtcaatgccctgggagccgcagtgaatcttctgactatctcaactccacgctgtccccatatgggatgcgcacttaaatggaataagacggaacattcgtgggattgtccctgccacggctcccgctttgacggggacggacatctgatagacaatccggctaccggagatttagttaagtaggtgaggacgccgccggtacggccggcggacggggtgaggtgtgtatatgagtctttcgtcccgggggaagattgtcgtggtttggagctgcgggagaagataaagtctgcggagcacactcccgctctgtgaaatgcatcgcgctgctaagctcgacaggacctcgctaatcagcgatggatttcaaaggcatccgcagactttatcttcccctccgccccaaggtcaggttttcgccgggacgaaagactccgcggggggatcggccccgtccgctggcctgcggccgctgattgtctcacgcgttaagtgcggggggcggaccttgtcgcggccactcaatattaccgtgtacggtaaatacgatatgccttcgatgcgcctttattaaggaattgcggaagatattgatatcggcctgcctgaaacacgtagtggccgcgacaaggccctccccatttaaggttggagacaatcagcggccggagcggaccatgtccggtgtgcgaaaaccttcgcctgagtcttccgtccctgcgaaaccctgaccggggggaaggaggcggaatcaattctggaggggatatggaagcccatccgtgcttaatgaggtttctcacgaatttagcacggctatgcgcttcgaaaagtgcaaacggtccccgtaagaattcattccggccggattcccccctcacgacaccctcaaaccagggacggaagactcagccatccccctcaccacaccggacatggtccgttccggacgcgtccccccaacctcagttaaatctccatttcgacttatggatctacagcagttttaatcctgcttttttatttcccgaatcacatccagaaccgtcccgtccctgtactcgacaatgcaggtgattttatctgtgcattcgattggtttcggtgttcccgtcagtccttcggcggtttgacgcagttcctcgattgtgacaagcttcaggctcgtcttttccaggtcttcttttaattcctgataatttttatggttcggattcagcgcaatgcccgcctccgttataacgaccgccaccgtatcccccggtgtacagcaggtaaatacttttttcacaaccgacggaatccgccctcttacaatcgggagcacgactatggaaatctgcgcccctgccgccacatcgggacctcccccaaggccccccatcatctccccgttggatccggtcaggatattgacgttgaaatcaatgtccacctccagggccgccagaatgccgaatgtctcccggttgagcatgcatccctttctggccggattggcatagagagaattatcaatctcgatgattcccggataatccacgattgcctttgcggcaaccgcgtcaaaagactgggagcaggccacggtgcggaccaggcctttctcgtgcatttccacaatcgcagcgggaattccgcccagggccatggacgctttaacgccccgttcctccatcttttcttccagatatttagtacaggcgatactgatggctccggctcccgtctggaagacgaatccgtctgtaaaacgtctcgatgccgccattacctcaaccgctcgtttggctatcagtaaatccctgggattttttgtaacccgggccgctcccgctccgatttttgccgtatcgccgatggaatccacaaccaccacgtagtccacatactcctgggaaatactgatcggaatacaggggtattccaccagatgatcggtaatgacgatcacctttcccgccgtcatcgcatcgataaaggagtaacccagcgcgccgcaggcatttggccccacaaggcccgtcgcattgccgtaatcatcggccgccgacgcgccgataaatgccacgtcgatggacaattcccctgcctctatggctcttggcctggctccgtgggggcgcaggattaccggttcgtccataactccccccaacactgcgtcgcccagttcccctctgattccgctggcctcgatactggcgattgtgccgtccttcacgtaatcgacaattgacgggttcttaatattgacaactgcactcggagcaaatttaagcccttttatccccagttcttttatcacgctcaatacgcggccaatcacctgatcgccctcgcggaagctgtggtgaaatgaaatcgtcattccatcctttagtccgctggcctcaaccgccgcttttaatcccggctgcaatttttcttcccccggtttcacggttgacagtcgccggtttgacataaccggctgatcggaagaacagtctgagtcgattccggcaaagggcctcacctgataggttcctatcatttcgggaagttctcttccaactgcattcttaatcaaaataatcacctcccgcattcatccctgctgccctggccttttccagtgtggctctggccctcagctccatcggtttatccagcatgctgccgtccaatgtgataacgcctttccccatcctgcttccttcctccagtgtctgaagcacgcggaccgcatagcgcacttccttctcgctgggagcaaagcaggcattcaccgcctcaatctggcggggatggatcaccgtctttccgtcaaacccgagatttctggaaagtgcggtgtcctctttcagtccttccatatcgttaatgttggaaaatacaatgtcaagcgcgtctatcccggcctcgcggcacgccagaagcactgcgttgcgcgcatagaatacttccataccggttctggttctcacagctcccatgctggccgtgaaatcttcagcccccagcgccatcgcttccacccgcggatcggccatggcgatttcccttgcgttaagaactcccatataggattcgatattacaccatagtttaatgctgccctcctcaataccggcttttttctcgatttccgatatccgggaagcgatggatttcacttcttttccgtattctaccttgggaattcggatggcgtccggcctggccctgacaatggcctccaagtcctcttctatatactcagaataaatgccgttgacgcgaaccaccacatacttgtctttaggcctgtggtaacgcagcgcattgcataccaggaatctggctgaatccttttccgctgccgatacagagtcttcgagatcataaaccagacagtcctcctcgtaaaatgccgcctggatcatattaaccgggctggaggcgctggcgtagagagacgtcctttttaagccgctccttttcccggtttttccggcatccccttttatgctgttttccatagcgcgtcctccttcgaccagtcgtattgctccccggaggctctgagtatgacggcctgcatccgggaacgtatcacgcaatcgagcgcccccttgtccaccaggctgatatcagcgtcccttacttcaaactcattcagaacctcctgcactgtcctgataatctcgtcgccgaaaatcgttttcacgacactgtccagctctatccggattccgtttccttcatttggcctgattgtaatctgcacatcgctggattccagtgttccgcagacggccggtttttttataagcataggttcctccctcttaaaaatacagtgtttgcctgttatgtggctctccgcacctctaaaaacataaaacgctttgcggaacacaggctgtgaattgtaacttcagtataacactcttgtgatataattaaaaatatatgtttaagatgtttcacataagtatttcatattccgtccgcgttgaatttaaaaatggccgctgcaatcgcatataaaatgaatcacttcattcctttgcaattgcatcggccattcataaaaatcactacagcagtttattcaccgtctccatcaccgcttccccaagctttgcggcttttacatccgcatcctccagggaagaacctttcacgcccaggtaaaacttaatctttggttccgtaccggacggtcttacgcagagccatgcattgtcttccagatcgtaataaaggacattggaggatgggaggccggtcggctccaccgctccggtcgtcatatctttcaccgtatccgcattataatctcttgcagaaagaaccttatacccgccgatctctgccggggtgttggaacggaaatattccatgatttcctggattttagccagtccttcaattcccttaaggccgatggcctgtacctcgtctttatagtagccgtatttctcatacatctctaccatagcgtcccagagggtcattcccttttctttataataagcggcggcctcatagagcgctgctgtcgctgagattgcgtccttatcacgggcataggtgccgatcaggcagccatagctctcttccatgccaaacagatacgttccttttcctgtcttctcattctcaagaaccctctggccgatccatttaaatccggtcagaacctcgacaagctccacaccgtaatatttcgccacggcatccaccagatttgtcgttacgattgatttaaccacctggccgtcggccggaatctctccctttgccttcttctggctcagcacatattcgcagagcagggagcccgacatatttcctgtcagcgggatatattcacctgactttgtatctttgacatagacgccaagacggtcggcatccggatcggtggccagaaccagatcggcgttcttctccttcgcaagcttcaggcccagctcaaaggcttcctttgcctccgggttcggataactcacggtcgggaattccccatccggcagctcctgttccggcactacgaaaacatgggtaaagcccagctccttcattacacggcgggccggaatgttaccggttccgtgcagcggtgtgtagacaatggtaatctgatcctgcatcttatcgatagccccctggtttaccacctgggccttcacctgggctatgtatttatcgtcaatctcccgcccgataatctgatagtttccggacgtcctggcactctgtgcgtctgtcgtcctgacagtggacagatcggtgatcgccataacctcttccgttacgcctttatcatgaggcggcgtaaactgggcgccatcctcccagtaaaccttgtatccgttatactccggcggattgtggctggcagtaatattgatacctgcgatacagcccagctcccgcactgcgaaagaaagctccggggtcggtcggagtgattcaaatttatatgctttaattccattggccgccagagtcagagccgcttcctcggcaaattcaggtgacatgcggcgggaatcgtatgcgattgcaacgcccttgccggctcctccctgtttgataatgtaattagccagtccctgtgtcgccctgcggactgtgtaaatgttcatacggttgattcctgcgccaataataccgcgaaggccggccgtaccgaattccagatccatgtaaaaccgctctttgatttcattttcatcaccggcgatatttcttaattcttcttttgtcgcctcgtcaaagtatggattatccagccactctttataaatcttcatgtaatccttcatataagatactcctcctgtacatttgttgagatcttcgcgcaaaatgaactcttacccaaagcacctcgcgggacagcgtctcccactcctatggggcatactgccggcgagcagtataatctgccgcactctaaccataattatagtatacttccccaaaaaataaagtttttttgaatgcgctgccgccaatgattccgtcatctgatatgtttcaggaattcatttctgtccttctgctggatttccagattctgcagcttctcgacgtttctggacgggatccatgccttgttcgcattgtaataaaagttgagctgtttccagtatttttcagggtacaggaacagatagtatagatattcccgctccttctcccccattgtcaggactctgtcataggaatttaaaaggcgcattcccagcttcatattccagccgtgcttttccatggcttttcttataaaatggtaaagatccgccacctgaacccccagatgcattttattaaattcaatcaccgccgtgtatcccggccccatcagaatatggtgctggttcagctcaccgtggcagagataatgttcgggcgctcccgtttcactcaccattctccccagtccttcacaggcttccagggcctgttcgtaaaacattgaaaaatttcccatcacacaaagttcgaaatctgatttcttccgcttggagctgataaaattcctggtgcgccgaagctccctgttatggcgttccatctcttccgtcattggttccgataatatggagcctaagttccaatcatcttttgtctctatcttcctgagagctttgtgcagacgcgcaatctgtgacacagcgcctgtaatctcctcctcatcccggatgttgcattctctgtccgaaaaccagtcctttaccacataccggcagccgtctccggccgttgagagcagttcgccctccttatttctgatatactgatcgacaaaacagcttccgccctcctgaagtgaccggagaacctcctcttcaaattccaggcgttttaccgtccctttatattcacggagcagcttcagccctttgtcggtttcgcagacccaggctcccctgcctctgcgaaacgccttgatttcaagttcatattgctctaaaacttccgtatttctgtcgttcacgcttcacccctccagacaactttcttttaagctacttctagggtatgttctcttttccataaatatgtaccggacatgccatagatttatagtattgacaaatctccctgaaggtattatagtttctttttgaacagtttaataataaacttcaaacaaggagggaacatcgattgcttgcaacacccggcagattttttgaaaaatttcagaagatggataaggtataccgcaggttctatcagcatgagctggcagagtaccagtttactccaaatgagatcgctgttattttatttttgtataacaacgccccggatcttgataccgccaccgacatcgtccgctgcaaaggcatctccaaaggactggtcgcgcgatccgtggattcgctttgcagggaggggtatctgacagccgtccgcgaaccggccgaccggaggatcatgcacctgaagctcagtgaaaagagccggccgatcacggaacggattgcggtcaagcaaaaagagctggccggtaaaattgaatgcggtatcacaccggaggagcttcgtatcacatccgctactctggataaactgcttattaatacagaacaattattaaaggggaaagaaaatcatgctgaataattccacatcaaagaatgccggttccggcatttcaaaggaggccgacttaggccatgacaagataggaaaactgctttttaacctggcgtttcccgccatcctggcacaaatcattaatgtattatataatatggtagaccggatgtatatcggccatattgaacatatcgggccagatgccctgaccggcgtaggtgttacgatgccggttatcatgtgtatctccgccttcgccgctctggtgagcatgggaggcgctcccagggcttccattatgatgggaaaggggagaaatgatcaggcagaaaagattttgggcaattgtacctccatgctcttaattatctccatcaccctgaccaccctcttcctcctgttcggccgttccgtgctgctgatgttcggagccagcgaaaagacaatcgtatacgcatgggcctacatggaaatctacgcgtgcggcacgattttcgttcagcttgcgctgggactcaatgcttttatcaatgcacagggctatgcgaaaatcggcatgatgacggttgccatcggcgccgtatgcaatattatacttgaccctattttcatcttcgcactgaatatgggcgtacggggcgccgcctgggccacaattatctcacaggccgtatcctgtatctggatcctcaagttcctgaccggcaaaaaaagtcttctgaaaatcaaacttcagaatatgaagctggatccgggcatcatcggcacctgcgtatcgctgggccttgcgccttttatcatgcagtttaccgagagtgtgctgtccgtctgctttaacaccagcctgttaaaatacggcggggatatcgcggtcggtgcgatgacgatcctgaccagcgttatgcagttttccatgctgccgcttcagggcctgacccagggcgcacaaccgattatcagctttaattacggggccggcaatatcgaccgtgtgaaaaaggccttccacctgcttctgcgctcctccatctgctacgccgcaattttatggtcaatctgtatgtttgcaccaagagtatttatcgccatcttcacaagcaatgcggagctgacacagtttactgtctgggcaatgcgtatctatatggccgcatccctgattttcagtatccagatcgcctgccagcagaccttcatcgccctgggcaatgcgaaaacctctgtttttcttgccctgctgcggaaagttctgctgttaattccactgattttcatcctgccgcagtttatcagcaaccaggttctggccgtgtttatagcggaaccgattgcggatattatcgcggtcagtacaacggcgattctgtttacaagagaatataagcgccttggcaaatatgaaagcgaagctgcttaacagcataagacaaaatcccgcgagcggttttaatttgacaggagagctttcctgttaaacgataacctgcgtggtccgcgcacaagtcaccgccttcaatgataaaaagctcagggaacacaggttgaatcacctggttccctgagcttttagctgtctcccgcactactgaaatacagggaatggaggctaaaacttgaaacagattccgtcgattgccgccgtgcctgctttggtcagcacaccgcctccgccgtctacccggctcgttcctccggggaagaactgtccgtccttcttcataatgccgttcggcatcacgagaagcactccaaaatctgttgttccggctattttatggcctctggcctccagaagcttcaccgtgtcaggcgagaatccttcctccagctcgaggccctgatctctggtcaggcagcacatgtggggggttttgactgccgaatccatcatcatgccgtagtccagcgtgttgataatcaactggagcgtgctggtgataattctcggtccgcctgcgcttcccacggccagaaccggttccccgtccttcagtacgatagtcggggacatgctggaaagaggcgtttttccgggacgcaccgcattggccatgccgtaggctaggccctgcgttgtcctgactcccactttgggactgaaatcggccattgtattattcatgatgaagcctctgcccggaattactactccgcagccccaccagttgcggatcgtctgggtttgtacaaatacattgccatacttgtccatcacggaaaaatgggaggtacagcctctgtattctttcgcatcgatcccttccgtcggagcgtattccccggccctgttcatgtcaatcctggacgccagctcctttgcatactctttggaaatgattttgtcaacctgtacctccacaaaatcaggatctcccattgccacggaacgatcggcaaacatcagcttcatcgtctctgccagcacatgggtgctgtccgccgaatgaaagcccattttctccaaatcaaactgttccagaatattcagcatctgtataatatggctgcccccggaggacggcggagccatcgaaaccacatcatatcctctgtaggttcccctgaccggcattcgttcgattggggtgcatttttccagatcctcttttaccaggatgcctttatgcttttgtacgtgcttcacaatatcatcggcaacaggcccgttatagaaccaatccactccgttcctggccacgccctccagcgtatccgcaagatccggatttgtgataatctcaccatattcccttggttttccttcattcagataaagctcggcaaaaccctcatactccgctttattatgttccgcctccggcgtgtctgaaattctcgcataagcaaaaccgcaggcaaatccttcgcggcacagccggatggccggctctgaaacttccttccaggtcattgtcccgtattttttaaggacattatccatggcgcggtagaaagcgggaacggctgtggcgcggccggaaaactcggtcaggttcaaatccaccccgccgtcctcatccaggaacatatcctgccaggctcccagaggggcgacgccccgcgcgtccacggcaaaaaattcatttgattctttatggtacacgatatggaaacagcctccgccgattccgctgtgatatggctccacgactcccagaaccagggatacggccacagcggcgtcaatggcatttccgccttttttcatcatttccaagcctgcggcggcagcatacgggttattgcagctcaccgctccctccgtcccggcggcatggggcttgtacattgcaatttcggaaacttcctttccaagatatggtctgtttggcatattattctctccttttatatcaggctttcgccgtatcttctttcgatgtgagaagcgtcactataattcccgccgtatagctggcaataattaccggatacacgatattgattttcgcattcaagccgagaatgacccaggctaccgctacaataatacccaccaatgtactggcggtggctgcctttgaattcacctttttccagaggattccgataattacgcagaagctgaacggagccgtaacgctgtaggtcagcgtaaggaacaaatcggttagctgtgcggacggaatcaggaatccgggaatcagggtgaagaatgccaggatgatggtgccccagcgggatacattcagaatctgcctgtcggacgcctttgtgttaatctgtgttttatatatgttggtaagaatcgttcccgtagccatcatcatcgtagccatcgtggctgcaataatcattgtacatacggcaaagatgatacctgcatacagaggggaactgaattccttaaccgtccaggcgaatgccgttgcaccgtcacccagtccgtcgtttgccgcgcgtcccatcatgcctacaatggccgtcaggatacagataggagctgcaaaaatatatccgataatacagccgttacggctggcctttgcatccctggccgcaagtaccggctgaagcaccgactgcataacggccgaacttaaggcgccgccgacggcccaggcaaatatctgctgtgtcggcatagccggtacaatcagtttatcgtaatcctttggaagctgcgatatcagtccgccgtaaccgccaaagccggccagattcttcacgacgaagataatcagcagcacataggtggaaatacaaacaatacggccgatcgccgaagatcctttcattcctgcaaagccggtgtagacagctgcgatggttacgccgcagaccatggcggccgcagagttaaaactcgggattacaatctggataatggaagcaattgtcttaagctgtatcggaatataaatacatccgaatatcacccagatgtatgactggagcctggccaggggagtggaatatcttctggcaagaaaatccggaagagcctcgctgaccatattttcacgaagtaccttggacaaagcccccaccagcaggaaatagacgcctcctgcaatggaataccagcagcccgcaatacccatggtatagccgttctgcgccgctcccacaatgctcatgccgccaatctgccatgcgccgagaacggctccgatggcaaaggcacccatggtcttgtctccgccggaccactggctggagctggtgatttttgttcctgcataaataccgaccccgataatcaatacgaacgtaataatccatgttgctactaacatataacgacctcctcttttcttttccgcttcagcttaaagcatgtttaatctgcttcggctcctcccccgccgcgcggccttccagccgcttaatgtattctcccgggcacaggccggtcatcttgcggaatattctgttaaaatgagactgatcataaaaatccatctgatgggacatttctgtcagagagcactccttattatccgacaactgacgtattgcactttgcagacaaatctgaaggctcagttgctttggcgtaatccccacatttttcagcaccagtttctggagcgtcctggccgtatagccgtatcgatcctccagttccttcatcctaactgcccttctgttttgcatcatatatccggcgatggaggcagccatcttttcatcactgtcccttcttcccgtctttttcgcctgacactgatctaaaaacctccgaagcagcagggaatgttcctgttcactgtccaccgcattgatcccctccatcgtagacagagcccatgggaaaacgtcttccagcttaaatccctcaggcggcacctcatcggcaggaatcccagtggcccaggtaaaacttcccggaataaactgtaccattaatacattttcaatcccgtacagcggtatttcctttttttccggcagaacgccgaacacataagccgacgcatctttctccttaaccgaaaatacaaggcccagctggcctactccgggaatacagtcaagaccggagtgtccctggtttacattgtagcgcataagcctgaggttaaaatcttccatgcagagcagtgaattttctctctgttttgtcacctcccaaaatggctgctgagaaaaaaagttcctttcacccatcattcctgtcatcttcataacagccccctttcccatgattctagcagttcgtaataggcggcaataggaaaaatcggaaataaatcccgttttcctcctgtttccgaccgctttcccctaattttgccgtatcggccgccacaatatccacactgcttccgcagatatcgcatacgattacgtcgtagcatttcacaggtgcctttactggtttttttgacctcctcggccaggacgtccgcatccagcagaacttcgcaggcatctatgattacttttcttgctatttcaatgtatgtcccaatatagcacatttaaatacggttcgatatccgcagaatatacaaaactttttcctgttttctaaacctgcacgctccgcgccaggtcatcgccatcattaagaaagaatcctgctcgtgggatgattctacgcctgcggcgggtcgcttagcgagtgtaacgagcttagtgaacaagccctctttagagttgcactcctccgcggagcggtttttatttaacaggagagctttcctgtaaaataaaaacggcctgcacgaatattgtgcaaaccgcttattaaatagatattatgatgttggggtcaaaaggtcttttgacccctttgataccggattgctccgcactgcgtgctctcgcggattatagcctgccggacagttatcagcccctgtttaattcatcttttcctccctgtcaagctctcgcagaaggctgatctgcagcaccagacatacaagaaaagaaatggcgtcagccagcggctgcgcaatctgaattcctaaaattccgattaaaggcggcatcagcagcacgcccgggatcaggaatacgccctgtctcgacactcccataaaagaagcgcggaacatctttcccgtagtctgcatcatcatattgctgatcatgacccagccgttgaggccgtatgtaaggcactggagccgcagcgctttgacaccgatttccaatacctgcgcatcgccctttctgaacagctgtatcaaaaacggggcggccgcaaattccactgtggccagtatcagaagaaacacagtcccgattttcacgcagaaccagaatcccttcttcacccgcccatacagctttgccccgtagttaaatccacagacgggctgaaatccctggccgaaaccaagaagtatggaattcgtgaaattggtgatccttgatacaatcgccatagccgcgattgcggcatcaccgtagggacgggcggccgtattcaggcatatcatggcaattccggatatagactgcctgcacagggacggcaggccgccgtttactatcatcttatagaaataacgtgagggcctgaaattcctgaatcttatcagaacattacctgccctgcggattccccagtacagcaggcagaagctgacaaactggctgataatcgtagccagggcggctcctgaaatccccatattaaacccgaatatcaaaatcggatccaggactatattgataagggcgcctgtcgtaaggccaatcatcccatagaatgcacttccctcaaagcggagctggttgttcagaaccagcgaggccgccatataaggcgctcctatcaggataaatttgagataatccatggcatatggcaggattgtttccgtggatcccagcaaaatgcagaggggcttcaggaaaataagtcctgttgcggctattaacgctccgccgataagcgcagaataaaatccgactgcagccagccgttccgccttatctgtctcctgcctgccgagaagacgtgaaatattattccccgagccctggccaaagaaaaatccgactgcctgtatagcagccatcacggcaaatgcaattcccaccgcaccggatgcactggtgctgattttgccgataaaaaaggtatcggccatattataaaacgtcgtaatcaggttgctgataatcgtcgggactgccagcctgcaaatcaggctttccaccggcgtctgcgtcatctgaatatattttgcgtccagatttgcctcgctcatccattcactccttcccgaacctactcttctgtatcttttttcactgccatattaagcagatattctttttcattgcattccggatgtttcagcacgtacaggaacagcctttgtaagatatttcccatatccggccccggccttactccggcggctatcaggtcctttccggttaccgccatatccctcatccggatacagtcacccctgctgcggactgcctccgccgtttttctgatacgtcctgtccccgcagcctcctccggaagcaaactctctttcagcagcagcagctcgtcgaaccggccgtcctccatactgctcataacttcccttactttgcagtcatcctcctgcagttcttctgaaaaccaccttaccagagtcttaactctgtccgtcgtatcattatccattttcaattctttcaggatttgggcggcacagtcctcccctccatacgaaagaaatgcggcccagcggagagactttctagccggcagtccggatgccctcctacaagcttccctcaccctgccgatgttggtcccaaacaccgagtgaaaacccgccgatatataagggctcatccccgtctcttccaccagcagaatacgttcgggatggtccgacagcagtgtttttgtcagctccgcctggatcctctctttgctcacgttggccaaattcggagcaatcacggtcagtgcggcataggtttcatcttctattgtaaagttcaactgggctgagaaccggatggcacgcagaatccggagagcatcttcggtaaaccgctccacggcattgccgacacagcggacgacaccctccttcaaatctttcatgccgccgaaaatatccactatccccgtctcatgactgtaagccatcgcattgatagtaaaatcacggcgtctcagatcctctttcaaatccgaggtaaaggccacctccttcgggtgtcttgcatcctcgtactcgccgtcgatccggtaagtcgtaatttcataaccgacatgctcccgcattaccgttacagttccatgctgaagccctgtatcgattgtcttcccaaacacctttttgacctgctccggcctggcggatgtggtgatatcccagtccccggggactctgccaaggagcgtgtccctgacacagccgccgacggcaaaagcctcgtagccgtctgctctaagcccggcaagaatctcctctacctgtttcggtattattatctgcacattctaagctcccttctgtccaatctccatgattccctgcagccgcctgcgcaaaccggccgtaaaaaaaccggggcaaaacatctgcatgccctgtcccggtctgtttctatgtttcatcccacattctctctgccggatggagcgccagaacgtgcctgaattgctttccgtcagatatgcgtcccactttccgggagatttgccccgaatgaattatcaaacacgctttagtatgctttcccccaatataccatctttgtcgcaggtttaccacaacatacgcacttatccgataaagtttcctgtgcaaaaggcatacagcgtgatgtcactcccaccgactctttaagctgatcttcacactcctggcagccgcaccacatggccttgataaagcccggcttatgatccgccagttccttcatctcttccatgttgacagcctcatacgtatgagcctcgcgatgtgcctttgccctttccagcatatcgtgctggattgtgccgagaagctctgctactttttcatttatctcatccagggaaacggttatcttctcgtgtgtatcgcggcgcactaaaactgcctggttctccgccagatctcttggtccaatctccacacgcaccggtattccgcgcatctcggattcactgaatttccatcccggagatttgtcggaatcatccaccttcactttgaaaccggagagaacttccttcagctcatatgccttatcaagaactccctccttgttctgctggatcggaacaatcataacctgaacgggagctatcctcggaggaagcaccagtccgttatcatcaccatgtaccataataatagcaccaatcaggcgagttgtcatgccccatgatgtctgatgaacgtattttaactgattatctttgtcaagatactggatttcgaatgctttggcgaatccgtccccaaagttatggctggttccggactgcagggccttgccgtcatgcatcagggcctcgattgtataagtcgcctccgcaccggcaaatttttctttatctgtctttttaccgcgtacaaccggcatggcaagaacttcctcacagaaatcagcatagagattcagcatcagctctgttctctcttctgcctgctccgccgtagcatgagccgtgtggccttcctgccataagaattctctggagcggaggaacggtcttgttgttttctcccagcggacaaccgaacaccactggttatataatctcggaagatcccggtaggactggatatctcttgcataaaaatcgcagaacagcgtctcagatgtcggtcttacgcacatcctctcctgaagaggctcaaggcctcccatggttacccaggcaacctcaggggcaaatccctccacatgatccttctctttttccagaaggctctcggggataaacataggcatatacacgttctgcacgcccgtctctttaaatcttctgtccagttcattctggatattctcccagatagcatatccggccggtttgataaccatgcatccctttacgctggaataatcgattaattcagctttctttaccacatccgtgtaccactgtgcaaaatccacatccatggatgtgatggcttccactaattttttgtcctttgccatgacaattctcctctcatttttccttccccccgcagtgcgatcctccgcggagcggtttttatttaacaggaacgacataattccctgccgccgcagtgcgatcccccgcggagcggtttttatttaacaggggtactttcctgttaaataaaaaagccatgcgatctcttcgtcatcgaaatgatcgaagggaccgaatggctgaaattcttcggcggtaccacccaatttaaccggacaagatgcctctgattccattcggcacctgatgcggttcactcttatatccgttaacgccggttctacgatgcactttcatgcatggctccaaggcaggttcaatcttccttgacacggaaacctctcaccgccggtttcctctctggatgtgtttaaagatttaatagtcctcttcaacgccgtatttgtctatcaaattatgtcgtgttgcttttatggtagatttgattttacgccatccaaactgctttgtcaagccctgtcagctgcctcccgcctctttttccactcccttctttgaaaaaataagattaacaggataatcggcagcgccaccaagtcgcccctctcatccagaataagcaggcctattacgcaggccagtaagattaacctctgccatagctttaacactcccatgacatacccttcactggccatcgccaaaacaattacacctattatggcaatcgctaaattgtaaatgacagccggtactgttgttcctgttagcagcagagccggtttatataccagcataaacggaataatgaaaccggcaatcgccagtctaaacgcactcacgccagtttttaaaggatcggactgggccagtcctgccgctacaaaggatgagagagctacaggaggtgtgatagttgacataatagcaaaataaaacacaaaaaagtgagcggccagcaggggaacacccatgttaaccaaagctggagccagcgtaagggctgttacgatatagcaggctgttgttggaagccccatgcccagaatgattgaagctgccatggctaaaaaaagcgccaaaaatttaatccccaacgccagtttaaaaatattcaatgagaacacaaggccaaatccggtaagggaaatcacaccaattacaatgccggcacaggcacaggcaatcgctaccgacatagtgcccttcactccattttccagtgcgcggcaaaaccgtctcagtgtcaggcggctgctctttctgaaaaaacttactacaattgcaatcagaatggaaagccaggccgcataaatcggattgtagcctttaacacttaagaaatagatgagagcaattaaggggatcgccatgtgtccatagtccctgaatgttgatcccagcttcggaatctgatccttttccagtgtcttcaatccctgtctgcgggcgcgcagctccacggagacccatacacacaaatagtaaagaaaagccggaataatggctgcaaagacgattacactgtactgcaccccaataaattgagccatcaggaatgctgccgcccccataaccggaggcataatctgccctcctgccgatgccacacactctaccgcgcctgcatattccggtgcgtatccaacagatttcattaaaggtatcgtcattacccccgtcgttgctacatttgcagaagtgcttccgctgactgttcccatcaggccgctggccaaagccgatactttggccggcccgcctacagaacctcctgccagtgccaatgcaagattgcttaaaaacttagacatgcctatttcagacatgatagctccaaaaaatataaacagcaccacataagtagccgatgtattgagcgctgtcccaaaaatgccttcatccgtcagatacagcagctttattattttgctgaccgtaaaacctgcgtggcgaaataccccgggtatctgccgcccaaaaacagcatataataaaaatacgcaggctacaataggcatagccatcccaatggcccgtctggtagcttctaaaacaagcacaagacagatgacaccgaatatcagatccattttggttggaattcccatttgagcattaatcttctttgcaaaaaccgcaacgtagagtgctgcgcaaaagctcagaagccccaatatgatatctatcaccgtaggtgccttactgcttgaatgtttcgttgccggaaataacagataaattagtaatataataactgccagatggaccgataccacatacttgtcatctaccagcccggaaccagctgcgtatagctggaacgcagccaaagacaaacataaggctgtgataatatatttccaggcgccttctaattccctcttttttccgcctttatcctcatctacatcggtcagagctccccctctttttttaataaaatcgcttaacgccataattgtctccccctttagcgtacaccagtctgttattttaagacgcctttttctttatagtacctttctgctcccggatgaagcggcaggccggagacattgattcctgattccagagtgatttcttttgcaatatcctggctttggaccagtgtatcaacattttcaaacaaattctttgtaatttcatagaccaggtcatcactgatactctcgtttacaatcagtaaagtccctgttgccactgtttttacatccgattcctgatttgggtatgtaccggacggaattgtatattcgtagtagtaagggagcctgttgattacattctgtatttcttcgtcgcttcccaaatccgccagcttgcattttccgctggccattgctttcatctggtgactctgccccaggcttcccgaaataatgtacccgtctattttctcatcaaccaccgcatccgacgcattggaatgagaaagctgctgtgcgttaaaatcgctcttggagataccaaagcaatccagaatccccatcgcctgggactccgaaccactgcccgcctcgccaatgtttactttttttccgacaatatcatcaatactgttaattccggaatctttcaaaaccggaatctggataatcgccgggtaaagatttgcaataactctaagcccttctacctgctttccttcaaactgcccgatcccatttactgcctcataaacagatgacgcggctgaaaatgcaagctgtatatcatccgttcctacccggagacaattctcactggaacctgccgttacctctgccgtaaaagatgtgccggggagtttatcattccatacctggcataatgcaacccccaaagtattaaacgttccgccggaagaagatgttcccatggacaggaacgcttcatcaccgtctgcctttaccgcatttttttcatcagccgccgcttccacggactggtccccgccttttgtttccggcgctgaagtaccagaacagccactcagtattcctcccactatcactacgtttgaaatcacaagagctaaaatcttttttgtttttaccataatgaaccctcctgatatgaaatatttttaccttctcacttgcataatatcatctcggttccatatgatccaatatatatttccatatcaatacataaaattcaaattatgatattgcattatcaaaagtgattcaaaattatgttgactgatccgcgcatttgaggcgctgaccgtacgaaaagataaacattgccgaatcagtttacggcgttctgctttacaccagttctttatagtacgctatcatatagtcacagaaatctctggtatcctgtgtcaggtacttatccttccgataacttaacgcaatgttccttgttttatcaaggccctttataggcagaaatttaatctgttcatcgtaaagacagcgttttttcgccgattgggaagcgattgtgattcccgcgtttacatttaaaagctccgtcctcaggtagtgatcgcactccataacaatattcaatttaatacctagttcttcacataattgatccatctgggtccgaaacggaaaacctttttgaagggcaataaatttttcacctataatgtcgtccactccgacactgtcttttttagcaagagggtgatcctgatgtacagccaccataaatctgtcctggcaaagaataatggtattcatatcatctcggtttatctcaggagatgttatgccaatatcaatctttccgctttccagcaattgaatgatatcttgaaattcttccacactctgacgccattttacagcgggatgacttctcataaaaccttcaattccgcgcataaactgagggcttgtcagagatacaaataatgtatgctcctgctctcccttcatttcatttatttccttcttggcattatcaatatctaacagaatccgattcactcttgacagaaatacctcaccgtatgcattcagtacaatagagcggccggaacggtcaaaaagcgggactcccagctcactttccagtcttgatatcaccacgctgattgccggctgggacacattaagttgttctgccgagcgggtaatgtgctgatttaacgctaccacctgaaaatatctaagttgcatcaattccataaattcactctcctttaatatttgtgcacaggacttagccggatgccgtaacagttcatgcagtctgaactgttacgactttttattcattataccgggatttatcgtactttacaattatatataatattatagttatgtatttatacgaaataatgaattgtaaattatattttgtgcctctatactgaaaaaaaaggaataaaggagcgttttttatgggagagggaacaaaattgcaagatatgctggaaaaaaaggaggttctaaagctggggggaggtcccgccagaatagaaaagcagcatgcagccggtaagctgacagccagggagcgtctggaactgctcttcgatccaggatcattccaggagtacaacatttttatgaaacaccgctgccatgactttggtatggagaagatcagcactccggcagagggagttgtgaccggctatggcctggtaaacgggcgtggcgtgtttgctttcgcacacgactttaccgtgttaggaggagccatgggggaaatgcagggtatgaaagtaaaaagaatgcaggagctggccctggacgcaggcctgccttttgtcggattaaatgattccggcggcgccaggattcaggagggccccagtacctcctatggaaacattttttacaataatgttatggcttccggggtcattcctcagatttccgctattatggggccttgtgccggaggtacagtatattccccggccctgacggattttatcctctctgtaaacggaaccagccgttcgtttattacaggacctgcggttattaaaaatgtaaccggagaaatcgtcgacgcggagacactcggcggagcaaagactcataatacgctctccggcgtatctcattttttctgccaggatgatgccgattgcatttacaaaatcaaacggctcctaagcttttttcccgccaactgccgcgaactgcctcctgtctacgcatgcaatgatgatccgaacagacgctgcgaacgcctgaatacactcgtgccagagtctttaaagaaagcttataatatcaaagaaattatccgtgaaatcgctgacgaacacgatttcttggaggttcaggaactgtatgccaccaatattgttataggatttatacggttaaacggaaaatctgtcggcgtagttgccaatcagccttccatgctggctggctgcatcgagatcaatgcctccgataaagccgcccgctttatccgtacctgtgactgctttaacattcctctgctttccattgtggacgtccccggttacctgccgggaatcaaacaggagcttggaggaatcatccgccacggagcaaaaatgctctacgcatggagtgaagcgacagtccccaaaatagtcatggcggttggcaaggtagttggtggagccaggcccgccatgtgttcctgggagctgcatcctgatttcatctttgcatggccaaccgcacagatgaccgtagtcggtccggaaagcgccgtggacatctgctgtaaaagtgaactgaaacgggctgaagaaaacggtgaagatacggctgctctgcgcacccagcttattgaagactatacaaaagaatatatgaatccatataaagccgctgaatgcggcaaattcgaagatataatcgaacctgcgcaatcaagacaggtaattattaggactttggaaatgttccgcaataaaaaagttgtgcttccgtcccgcaaacacggaaacattccgttatagcagcagtttcaccgtgaaaaaaccaaatcaataaggaaccataagggggatttaccatgccgaatacagttaattatgcaagaggaccgttaagcggtattaccgtcctagatttaacccaatttttatcagggccgttctgcacaatgataatggcggatttaggcgccgacattttgaaaatagagcgtcctgaccgccccagagccagcggcccatatttacatggcgaacggatttatgacctttccgttaaccggagcaaaaaaagtatgactctaaatctgaaatcagatgcaggaaaggatatttttaaaaagcttttaatatcttccgatgttgtgatagagaatttcaaacccgggacaatggagcgtatgggtctgggatatgaagaacttaagaaaatcagaccaaatttaatttatgccgccatatccggctttggctataccggcccttacaagaaccgtggggccctggatatggtaattcagggcatgagcggtttgatgagtctgacaggtgaaccaaacggcaggccaacaagatgcggaacctccgccagtgatatattttccggaatctatatgttcggcgccgtagcatccgctctctacgagcgcgaaaaaacaggaaaaggtcagtttattgacgtggcgatgttagattccaccttctcctgtctggaaaatgcagtaatcaatacctgtatatttaataaaaatccggaacgggtgggaaacagtcatcccaccagtgttccgtttcagacatttcagacctctgacggtgaaatcatcatcacctgctccagagacagcgccttttattccctttgccgcgccatgggacgccctgatatgattcaggacgaacgctttgccaaagccgaggccagaagattgaataaggagcttctagaggatgagattacccgcttcaccagcacccgcaccctggacgaatgtgaagaaaccctgaatcaattcggagttcctaatggccgtatcaataccctgactatgatctgcaaggatccacaaattgctgcccgcgacatgatcgtgaaagtggaacaccctgttgcaggaacgtatcagatggccggaagtccattaaaattcagcagtttaacagaggcccactatgaaccggcacctacacttggtcaacataccagagagatcctatccgaacggttaaacatgacagatacggaaattgaagccctgctaaaagaacaggaatctatgccataaccccttatagtataagccacacaaattatctgtttatttaaattatttttttaacaagcgttataacgttaataattatatcatcaattgttacgttcttcacaataaaaacaaaataatttgacaaatcctctctccttttctataattgcaagcacaccaatcggcagcgcatgaaaattacagggctgccggtctggattcttaaagatgaggtgaggagaatgagtatctatgtcattaccggcggtacaaccggaattggtgccgaagcccgcaagaagctgcaggacgaagggcacgaagtatttaacattgattacaacggaggggattacactgccgacctatccacggacgagggaagaaagggcgcagtcaaagcggtatttttaaaatacccggacggaattgacggagtcctctgtaatgccggcgtcggtcccaccgctccgccgaagaagatttttgcactgaatttcttcgcagccatcgcaatagccgaaggtctgcgcccgcttcttaaaaaaaagggcggaaactgtgtcgtcacttcctccaactcgattacaaatgccactgtaaaacgcgactgggtcgatatgctgtcgaatgtggcggatgagaacgccacaatggaatttgccggacatatcccgccggacaaaacaccgtcctgctacagctcctccaagcacgcgctggcccgctgggtacgccgcgtatcttcttcctgggcggcagacggcctgcgcatcaacgccgtggcacccggcaatacaaccactccgatgacgaaaggaatgacggaaaagcagatggacgcggcgctgctgattccaatcccgacccgttacggccgcaaggaattcctcgacgcctctgaaattgccaacgccatggtattcctgttatcaccgctggccagcggtatcaacggagtcattctgtttgtagacggaggcatcgacgcgctgctccgctccgaacgtttttaaccggtcatctaatcaatatcatcagagaagggagcagacgctatgcgcattttagaacaatacatggagtgtatgaaaaaaggcgataatatcggcctggcagatttgtttaatgaaaaaggaattcttcatgatacctcattcttaaagctgaataaagatatcatgcatctggaaggaaagatggcaattgaaatgatgttccaccaccgtttcggtttcaacggagggccgtttcctattacaaatacggtacataaggcagatgacaacgtatgttattttattgaatacggcgaccgcgttgtaccggtaactgcttatatcacagaaattgatgaagacgggaaaattatgaggctggatatatttccgctgtaattccgggaaaaggggaggttcaccgcagtcccgcggaaatctccccttttcctatccgttaaatactgttttccgttattgtaaccacggttttttcggctcgtctcccgcttttgtaccgcagaaagaaaagcagcgtaatgataaggcacagtgactccgacacagccggggacagccaaatcccgttttcgcctatcagctgcgtcaatataatgagacaggccgacaggagaagaaaacttctgcacgatgaaatgacgacagagtataccggccgctcaaccgctgtaaagaaaccggccgtcaccacattaaaaccgacaatcgcaaatgaaagtccgtacatgcgcagcgcactcaccgagtaggcgaacagctcctgatcccttttgtccaggaacagccctactgccgcctggggaatcatttcagcaattaccaggaacacaaccgtggatataccggccgcgaaaatggaatagccaaacagcctgcggtatttctcctgttcgcccgccccgtaatgaaaactgacaaggggctgcactccctggctgattccggccatactgttaagagccagcgtattaacatatgaaatcacggtgtagctgacaactcccttattcccgatgatgctcagtatcatatggttaaacaggaaaattacgaggccgcccgacatctcggtaatgctgtccgacattcccagcggaatgattctcctgtaaagcttcaaattccatttgaatctgccaaagcgcaggcgcttggagcggaacccaaagtacagggcgaacagtgtcgtagacacaacctgggcaataccggtggcaatcgccgctccttcgactcccatatggagtttcataacgaacacataatcaagtacaatgtttgttacggcgcttgtcataaccccgccatctgaagcggcggacagccgtccgtcttcacaaaaatctccatattataagatacaacaaagaacactgcaaaaacggaaatccagcccagatatccttttacatatccgatcgtctcaggcccggccccaggaaataggcaatcctttccagacttaaccaggtcagcagggaaataatggctcccaccgcaaccagtataatcaggttctggttaaatgtattgcgcgcctcttcctccttaccttctcccaggaatatcgccatcagtgtcgacgtccctgtcgccatcataaggccgacggagaaaataaaaatcgtataaggcatggacaggttaactgccgccagcgcatattcccctactccccgcgcaacgaaaattccatcaaccatcgtgtacaatgcaaaaatccacatagatatgatggaaggaatgacaaaacggcagaattttttcagtaacatgataaaacctccttttattgactttcattataaaccttcgtataatacgaatgtcaagggaggtagaagaagttgaacaattcttataaaattaaagaaatttcaagattatacggactttgcagcgacacgctgcgatattatgaagaacaggggcttctctctccaaagcgcgggagaaccggtaccgtatgttcggtgtccaggatatcggtaaactgaacgtcatccgttcccttcgggagctcgatattcctctggaacgaatccgtgagtatatccataaccgtgatattgattcaaccctgcggcttctggatgaggaggagactctgatcctctcccaaattgagcgcctccgggaaaagtatgaagatattaacgcccggaaaacagagcttcaaaaggacaggcagatcaaagacagacagttttccatccgccggtttgaagcaaggccctgttttcagcttacggaagatatcatcctggaaaacgatgtggattttgtcttaaagaagctggaacaaaaatatgaagataacattcacgccataggcattaagggatttggagcggagatggatcccgtcagtatggagcagggtgactataatcattttcgttcggttttcttcatcagcgactgggataattacagctcggttattcctgagggagagtatgcctctctgttctattggggcgcttatgagcagaggattacggaagtgttctcccaatttgtatcccgcatacaggagtccggatatgaactctgcggtgttccgctggaactgtaccatattgatatgaatgatacaaaccggcatgaggagtatctgacggaattacaggtgctggtaaagcccttaaaacgtcccgctgacgggtgataagctgcggtaccttccgaccggaagatcggaaacgccggccgggggaaaatcctccggccggcatactccttaccttactccttactgattactccggcagttcggaaagcgaggcactacacagttcccttttccagcgggtatccgcatgttgttatcaaggcagttccttgtacaataacacctcacgggatactacccgtgaacagtaactcaataatttctgttgagatattccaagagcatatcagaagaccatcttatatgctccttaatacatattttaaactgctcctcatcacgttgttccaggcaattcagcagttccaggtgccgtcgtatgctttcttccaggttcgtatatacctgggaagacagaatacggtatcgttttgctttaaaatagatatgtttcgccaaaatgtgtacataatcattttctgtgcgctccagaatcaaatcatgaacgattccatccagttcattaaaacggcggtacttctctttttcatccagttcccgagttacagaaagctcttcaaatttatttttcagagtttgaatttctccgtctgtgatattcctgaccgctgatttggatgctataagttccagagtctcacgtacctcaaaaatgtccttcatatcctttactgacagaggtttcaaaaatgcacccattcccggtcttaccaacaataccttctcggcctctaaacgccgtaccgcttctctcaccggcgttcggctcatatatagatattctgcaatatcagtctcctgtatcaactccccggtctgatttctccatctaaaattaacttttttattccctcataggcgacatccgtaaaatttttcttcttactttcagtacataatttgtgaattttccccatagtatcctactctttcagatgaaatctccttctgccttattctgccccgaacccattttaattcgtatcacagaatccccatctcacgggcctcaaatgtaagctcttccctgaatttaggatgcgcaatccggattaactctcttgttctttgtgacggtgttttaccaactaacgtagccactccatattctgtcactacatactcaatcatggtgcggggcagacttacaggcgtccccttattgaaggaaggcgttattttagaaattttcatatttttagtagccgactccagcacaacgattgattttccctccagattggctgctgcgcctgaagcaaagttacagatgcctcccattccgctatactgtctccccttaagaaattcagcgttcgcctgtcccatcagatctatttccaccgcattattgattgcagtcatacgtctctgattatatatcgtacccggattcagtacttcctgacaacgattgatttctaatcccagattatgatcggaccattcaaacagctcacgtgttccaaccatctgcgtaaaaaccgcttttccaggcttctcgctctttttagcgttggagatgatacctttttccgttaaatgcatcaaaatatcaccgtagacttctgtatgtacacctaaatcacgcttgttctccagatacataagagacgctgcgttcagccgaccaagacctacctcaattgtagcttcatcagggattaaatccgacaggtatccaccgatggcacggtaagtatccacattctcaccatcatgatcgataggaatcacttttaatggatagttttctccctcatcgactatatagtcaaactcactgatatgaattacattgctgccatatatgaatggaaaatttgtatttgtttccgcaatgattaaatcggcctttttacaggcctgccgaatgaaatccgtacaggttcccatggatacataaccatgctcatccggttttgtcacttcaaggaaagctacattacattcaagtcctatagatgctattttttcatacagccagtattcacccggaatataatctaagcgtccctcattaaaaaattggtgggaactttcattcagataattccgacccttgaaaaataaggcttttcaaggattttgtcagttacccgtgtgttactcaaactcctcggagagttctcccgttgttttattataacacacccgtccggaacttacacctcaatgatgcgaacatgctccggctgaccggacaggaaaattccgtcgatagtctcaagcattttctttccctctactgtgtgaattgccttgatataatacgactgtcctctcactgcacgtccgcagatgctttcattgccccatgatgcagaacgacggagattcagagcaccatcacaatcaacgatcgctcttgtggtcttttccggatagattgtgtcagaatcggacacctgttcctctgtttttctttcatcgtctccggatgtctcctgccctgctgcatcgtctccatcaccggaggtctgctgtccgttctcctgctcgctatttgccccattctgcccgttttccggttctactggtgtatttcctccagtgcctccgttttcgtcgtctgtggacgctcctgcgttgccctgctgcccctctgcatccttttcatcggtgagggttgttgctgctttgagttcctctgcggtcatcgtgccgaccttgttcccgtctgcattgtaggtgttcacgctaccgtcgggatttgtctccagtgctccctccggaacattgtccgtgagtgagccgatgacgtttccgttttcatcccacacaaccagttcctcgttttttgctgctgctttcaacgctccctcgattgtcttgtattccttgcagtccttttttttgaactccgttcctttgcctaaatagtataacatgttttcgccctcctctgctactttttgagatatttgctcgacgcaaatcccaccacgtttttatatgctacatacaaccacttcactccggacacatccgtgtaatatccataacactgacacgtctctccgctctgcattgtcgtcaagactttcttgtcttttcctgttcctgctcccgaccgtagattcaacgctcctgctcccgttaccttgtacgttcctgcaaggctcttgttgaacccttttgcggtctccagtttcacgttgctattgattggaactgtctgcgatgcacctcctccggatgcctttgctccattggtgaggttcgtcgccacatgagcaccatcgttcaacagaatgtcgccctcaagcaaatacgcatctgatgtcagatattttttatctgtcagcacctcgaatcctgctgccttgagacctgctctcatgtttccggtatagagataaatgctcacattcttcattttctcatttcccagtctgtaacctgcaccctttacgattgcagcgacaccggatgaacaatctgcctcacacgcaatcgtgatttgtgcagggtcgtaattcgatgccttgagatgctcccaaaatgtgtatctctctgactggtcatatccgattttattgttgactgctgctgcctttgccatgctcgcaatcatttttctgacctttgcatccggatgacggaggacacatttccacggtctgttataccaatttataaccctccactctgtacctgtctggtctcctgcctttcctccgctgtatctgttattttcatcatgtccgcaatttgaaatcatttgttttcctccttgtcaaattcttctgtgtttctgtccgtcatgtctcccataagttccggacaatgttcctcaagttctgtgtacacaatcaacccgcaaatcagtaacggaataccgacccataaaatcgcacatcccaatgaaagaataaaccatactaccaccgacattctttccgcaaattcgtcatccggataataatattcgtcatagtaaagctcctgttcttttttgcttgctctgtcgacccaaatgtaaaacgctgtcatcgctaaaaatacgacgaccgcacccacaacgtacacaatcccgattgtccttgcgttctgcatgaaaaagtctacgattttactcattgacctcacctgcctcaccgctcacaagcgtctgcatcgctttgttgctctcaagcatctttttcattctctcaagtgcctcgtcgaccatcatcgaaaaagcctcaaaagaaatcactctcgcaagccacgcaaaccttgcgacaaacatgtcatatacataacgcagcttgatttgacctgtaccgcctcccagttctttttctgcctttgtgactgcatagagcagccattctctcactttgttcaactgcttgtctgacggcattttcacgaaaacatatactgcatatcctcccgctgcacataccgcaatcagacccacaatcacaaaccaattctcgacgatgtatttcatccttgtacctcctcgtcatcctgttccggttcgtcattgtgttgtatttctccgtttgactttgttcccttgaccgttttcacggacttaatgagtgccattgcaccgccctcaactgaaagaaatctgaatacattctcaatcagtgtcgacggctctgaacccatccgtaaaaacacaaatatcatcacgactgtaaagataaatgctgcaagaatcaaagtgaatacaacacgtttcatgaacagaccggacacctttttgtcatgtctctcttttcgctctcttatccgatacattcttttcagatgccggattctgatgcgacgttcctgttctgtcattctcatgtattgcctcttttctgtgaggttgattcttgcccgtttcctgccctcctgttatcggtcggaatgctgttctccgtccagtctcttgtgataactcttgagtgactgttccacaatgacaacacgctctctcaatgttttcatctcctcacggttctctctcgattcccgtttgatgtctttgaggtcgtctgcgatgttctcaagtttcaccatcaccatcgtgtcggttgttgctctctgttccgcatcttcctgtgtgtcctttttctcatttctctgctttgagcagataccgaaaaaaatcgcaaacgcaacagatactccggagagcaacagggaaatctcaatcgtcaacggcgttctcctttccgaactctgtcgcctcgaggtcgtcggtgtcgcagtatttccgcatgtggtattcgagaacatccatctccctgtctgtctcctctacctcctgccggagttccactctgaccgcctcctcgattttcgactgttcaatgattgtttgctgctttttcacgattgcggatagagtttccgtcacatcacacaatcgtgatattatttcaagcggactcattctgcaccaccgccagagtatgcctcccctgtgatgtattcatattcatccactgaaatactaccctttgagacacgctcggaaatctgttcctttgtgagagtgccttttttgtacattcttttgagactttcaacaagcattttcatactaaatcaacccctcctcaatcaactgctgtgtgtattcgtcaatgactgcatctttctgaaactgtgtcacggattcaacgattcctgttgtgttggatgcaacaacctcctgcatgagcgtcaatctgtcatattcctcccgtgacatctcacgctcctctcgctgccatccggtgattttctttccgtctgcatcctctttcgttgctttcttgatattgcgtctctgatataccgttgtcggtgacgctgttgtgtcgaactcctccggctgttctgcctccgttccgaacacttctctccattctttcatgtttttctcgctcctttcgctttgaatgtttgctaactattttctttaatttcttaacattcacataaggcttgaccctttgcaggtacatgtcgtatgtgtctgtattgctcaagtaacccatgtatgacagaattgcggttgcatcgtaccatgtgattttctctttctttgcgacacggttgactttccgtgtgcaactcaacatgatgctttcccgcagaatcgtcttgtcgtgatagaactggaatcccatgaaatcgagtggtctcccttttctctttccggtctttttctctgtgtaatcgaaccggaacacctgccagtttcctttcatctgcaagttgaacttttctctcaagaatctctcaatctcctgctgcatcctgtggagttcctttttgttctttccgaacaccaccatatcatccatataccggatataatgcaccgctttcaactgctctttgatgaaatggtcgagaggctgcaacatgaaatttgacaaccactgcgacgtgtaaaaccctaaaggcaacccgacctcgctcccatcaattatcagttcgaggatgtacaacattctctcgtctctgattttcttcttgagccacgctttcaagacatcatggtcaacactctcgaaaaagtgtcgaatatccatcttgagaacatatttgcagttctttttgtctcgctgaatccacctctcgatgtactttttcccataatgagcacccctgttcggtacgctcccacatgagaactcatacatccctttcatgaaaatgtcataacacgcagagacgacaatgtgatgaatcacctgctcataattgtatcgaggtttctcaatcattctcactttcctgcttgttccctcgttgatgcagacttttccgtgtcttgatggtttccatgccttttccggatgtggtatgtcgtacccctccggtgcagtgttctcaagttgctcgacgacgttcttgacatgtctctgaatgttggtcggctctaatatcaccgcaacgtccggacgctctgtcttgccctttgctgctttatgaaatttttgctcaacattgctatgttctaacataggcttgtacaggttattgacggatttctttcccatctttcttatcacctcaaggtctttctgatattcttactcgaccctgcctgcatcggtatcatttccactggttaggtgtatttcaacaccctgcggtgtaggaaaaaggtgtgcttttggttaaatgctccataatttgataagattggctcgccacgatgttcgtgttcacgttcgtcgcagggttgttcacattccagtacgacaaaccgcacttcgacccgttgccacggttgccaccgaacagggcaaggacgcacaccgattcccctgtcatgtcaaggtcatcttttttgtcatgtcggagattctatcacaattttttctgtttgtgtcggatgtgcctcccgtttccatcatcgtggaaaatccttgtcatgccggacacctcggagggtaaaccctccgaacctccctttttattgcgggggagtatctcccccgttccccctcgctgcttacgcagcagcaacaggcggtttacaagaaaggctcgccacgatgctcgtgtccacgtacgtcgcagggttgttcacatgccagcacgacaaaccgcacttcgacccgtcgccacgggtgccaccgaacagggcaactgcaacgatcgtattgttgaaccataacccatcacattcgtatgtggtctcacttccggatgcaacggtcgggattcttccgatgtcggatgccatttccattcttgaacagtagcctccggatgttccggacggtgtcagtcctgtgtttgtgtaccccgcacctgttgagttgtacggaggaactgctttcacatgatacactccgttgataagcagcagacctctcaaacgtttccagtagttcgtaaagaagttctcgcagtaaaatactttgactgcctgtgtggtcgatgtataaccgaaaaactgtccttttccgttgagtgttccggtctgcaagaaattgtcggactgactgtttccgtttccaaacttgccttgtgagttggtgctgcatgtaatcatcgtacacatttcatacatgaggttgatttcagaaaatgactgtttatcccatctgtcaccgttctgctttgctgcggtcgtctcctgctcgtctgtcatggacgctgtcggtgtgagaccggagagtgaacgcatcctgttgttgacaaccgaaccctcgtacatcgggaaatatgtcacaggcaggacatttccgtctgcgtcggtgtgtgcgtatgctttgtatgtgtcatcgtactgctcctcacagaacacaacaaaatgataattgttctgtgtccatctcttgacccaaatcagaggaatctcggacattgcatttccaccgtatgatgtttttgtgatgtccgatgctcctccgttcagcttgagagcatggttttcatgattcagttcatagtcaaccgttccgtcagttcttaccatgaccggacggtttttctttacgaaccaaatatctccccagtctccataatcgaacccgcctcctgcgaaattcattcctgcgggtgtcattccaaccgcatcataaagatatttgacacgggttgccggattgctgtcgaggaggttgattctcattccgtatcttttcggttttgcttttgcgtcctcgataattttctttgtgttggaaagaatctcctgcgacgtggattctttcgccatgaatattctgtcacctgctgccattattcacttgcctcctttgtgatttcctcaaaatacaacgtaccgtttgagatacccattcgatacttgatttgtgtcgcatcgtcctccagttcgacagtcgttgccagtgctttcatttctgcaagcaactccgttccctttttgaccatgtcgtcatagtacgtttttgcatcttcgtccattccggtcttgatttctctgacctcctcgatgtcaaatgcgacagggaggctcatgaactcggtcgaaccgttaccgattcggatgattctgtgaccgcttgtcgtggtttcgagacccagttctccatcatcgagaaccctcttgctctccgtccactctgcggtcgttccctttttcagagtgattgttgctgttgccattctttttcacctctttctcaaattgtgtgtgacgttcctgcgatgtacttgtcataatcggtcgtgaacggtgttcctcccttgacaagcaggaggtcggttgattttggtgttcctccatccacattgatgttgatgtccgtctcaagttctctgatgcgttcataatagtctttgactgctgccagtatcgcatcaagaccggactgactgatgatgattttgtttgcctcctcggtcgctgtcagacatttctttgtctgctcgattgctgcctccatcgcctcgacacattttgcaatcgcctttgcggtgtcatcctctctccggctctctttgatttctcttgccttttcagcagcctctctcaaccgctcctgtgcctgtctgaccgcctctgctgcatcaatggtgttctgtgtgtcctgtgcgatttgcagagcctctctcgctgctgcaatggtgttctccagtcttgtatattctccggagtgaatgatttccgattcatcccgctgtgacggaaaaatctccatctcaaacgtcgcactcgtcagcaatgcaccattttgatacaactgcacctcacacaacgctgttccgtgaacctgcaacattcctcttgtgagaggaatgagagcctcatttccggacttttctccatcgttgtgaacgtgtgtcttgtccggtttggtcatgttgataatgacctccacattgtccggtatctcatacacgacaccgtcctccatgagcgtcactccgatgtaccgtgttcccatatccatctgtttcgctgcaactgcaaaatgctgtgtgtctccatacaaatccactttgatgtgtctaatgatttccaattttctcacctcctcatgacaattcttgctcggttctctgaacctcctcgaatgacagtcttgtgtttgccagttcgaccttgttcttttctttcgtcaacgggtattcatagaatttcacaatcctgtggctctcacggattcccgttgacttggagatcagcagcaccgtgtctcccagtgctatactgaacacctctttgtactgttcttttttctcctcgtcctgcactgcctcaacaagattgatgatttctgctgtgtacgacctgtatggtttggaaagttcgtccagtttcgcctccgcatcctctttcagtgattccgcatccgtgtatctttcatctttccacgtcatcgttttcactttctttgaatactggtgattctcaacataatttttcccgtcgatattcagcatcaatccatctttccctatcggaatgagccttgttgcaaagtcgtatgagtttgactgcacctgcaaccgcttgaggttcagacgttcaatgaaatatgctcctctgtcctctccgtatttctcatataccgaaattcccttgttcagagaatcgaacaccatctcgcatctatacgttgtaattgcctgttgagcgacatcccatgcagaacagttctgctctatccggattgttctctttttggaaacatcgcaccggatgactttccatccagttccgtcgattgcctctgttagacattcatcgaccgtcttttccacagtctcgaatccctgcggatattgtttgccctccagttcctcgacgttcaatgttccggtgcatttgtaccattccccgctcggctcgacctgcttgataacaaattcgtccgtgtcggttctgatatatccctcctctttgatgtccgctgcatacctgtttgtctttcggaactcgaatgtgatttccttatctccagtcttgagagtgcttgtgatgcacgtttcttttattccggataaaatacacaccttttcgtgtgaatcattgtacaaatccatctgaccgcctcctataaccacataggtttatactgcaatgtgacaagtgcgttattgtcagagaaaatgagatgatgttccttttcctgccctgttgtgagatacggaaattccatcaatgacacatccttgaacttgttctctccgtccatcgttgcgaatcctgtttctccgtcaatgatgacggttgctcctctcggaatcgtgtcgataataatttcaccgcaggaaagaccgttgattcttaactgctcaatgtactccgttgctgtgattgtcagtctgcacggtgtcgccctgtttccctgtgcctcaaatattgcctcatacgctccctgccagttcaaactcacttcgtcgctgaaccagtaccccgtgaatttgaactctgctgtgtaccgtgttttcgttatcgtcttgctcaacgagttccccgtcatatatgccttaaaatggcgactgtacccgtccagtgtaaggacaacacctttctgcaactctgcattgaaatcactgacatgtttttgaacctcgtctctgtcttttcctctgaacaggactgtcactgtcagtccggacaatggtgtgtatgtttcggattccgacggtatcaatgccccgtcgaacatctccaccgtcacccccgtctgtggaggctcgaaatcaactgtcaactgctttgcatcgaatgaccgaatgtctatgctgtcaattttcatgtcctcacctccgtttttttgttgctattgcaagattatcactgaccttttcggtcgttctgcttgccacttcgtctccgtcaatatagttatgaacctcgataaaagcgttcacattctgattgattgctttcagctttcggtcaagcattgagttcaattctgtgtaaaactctgcaagtggcaagattgcctctgctcctgcctctcctccgaccatgagcctcgttccattcattccgaacactgtcggacttgtcatgattcctcctgttttgtaccattcaacaccgaatgacggtacagatggagggttcagactgaacgaaccggatatactaaaatgtggcattttcaaatgtggcaatgaccactcaaaattgaaaaatcccttgattctgtcgatagcatttgagaccgctgtctttgcggattccatcttttcgctgaattttgctcgtatgctctccatgactgaaccgaccgttgaaagagcaccgttcaattttgtcgagaaagatgacttgatgctgtcgagttttccacctgtcaacgtgttcgctgtggacatgagtgagttcatcgtgtccttgatgcctgtgaatgtagccgacacaattcctttcatgcccccgcctttttcgttataggcagatttcatattttccagttttgtggaaacattggtctttgcggtctccatgagattcgtcgctgtgtccttgatgtttgcaaacctcgttgaccatccctgttttacgctctcgaccttgtttgtaaaatcgttcttgagtgacaggagtttgttgctcgcatctgtgttccactgctgcatcgtcgttgaaatcgtcgatttcatgtgagaccatccggttgacacataggactgtattccggaaatcttcgtcgtgaaatcggttctgatttccgtcagtttatttgatgcgtttgttttccactcggtcatcttggatgtgaccgtcgttttcatattctcccaaccctcggagactttcgtcttgatttccgatgtcttttcggagaattttgtcttgatttctgtcagttttcctcccgacagattatcaacgaacgtgaatccggctgtgtaatagcctttgattccctcccatcctgctgcaactactcctttaataccgcccccgttttcctcataggcggttttcatgttccccagtttctcctttgcggtgtcaactgctgcccccatgaactttgtgacagtatttttcaccgctgaaaacgtctttgtcgctgcttgtccgactgcactattcgcaaccgaatcttttatctcgttcaccttattcgtgaccgcctcttttgctttcgagaacgctcctgttatggtttccttgattgcgttgaatttctccttgacgttactccacaactcggataatttttctttgaccttatcccagtttttatataaagcgattcctgctgcgatcagtcctgcaatcaatgtcacaattaaaataatcggacacagattcatgactgcattgagggcggtctgtgccaccgtcattcctccagtcactccggtcgctgtcgctgttgctgcggtatgtgctgcctccgctgctgcccctgctgtgtctgctgctgttcctgctgcggttgctgctgtcttggctgttatctttgcgatgattcctccgacaaacgatgcaaactgttgacctgttttcaccgtcgtcgatattccctgtgctacttttccgaatccgattgctaaaggacccaccgcagccaccacaagaccgaccttgatgattgtctgctgttgcccctcgtcaagagaggtgaaccactttgtcagttcttgaatctttgtcgtcaccttttcgatgactggtgctgctgcggtctgtgctgttgtcgccagtgttgacaatgccagttttgcattgttcatcgctattgttgcattatcaatcgggtcgagtgttccgttgtatgtgtcctcgaccgtcgttccatattctgacattgaggatgacaggcttgtgaggtcaattctgttctctcggattgctgtcgccatttccgcagcaccctttttcccgaacagttctgtcgcaatctgtaaagcctctgtgtccgtctttgcgttcttaatgctgccgattgtctcctccagtgcgacatccattgactttccctcggctgttgcgttctgcaatgcctttttcagtcctgccagtgctgtcgtagaatcaacaccgttcgcatcgaattgagccatcaaattgattgcttgtggtaatgacaaccccatctctttgaacgctgaattgttatccagtacataactttcgagtttgtcaacggaaattcctgtctcctgtgcttttgatgtcagcaatcccaacagattccccgtctgtgatgtgtctatgttccacgctttcatgattttgtccacttggtcaacagactgtgtcacattcgttccgtttatgctcgaaaactgaatgaattgcgttgacaggctctccagttcctctcctgtcgaatgaaatctcgtgtttacttcaccgatagcctctccgaccgttgacatgtcctccggcatacttccgaaaacattgtccgcagatgcggtcaatccctccagtgcctctccggttgctccggtctttgtcactatcgtgtcatatccctcgtcgagttccttgaacgctgcgattgatgctgctcctattgcagcaattcccgcagaaacgacggacattttctttccgaaactctccatcttttgtcctgctttgtcacaaccgcttgcaaattcattcagtttatgatttttcagttccttgtttactttttcgagttcagattccatctcgacgagtgatgcttttgatgcgttcgtctttgtggtctgatttgcaagagcagtctccgtctttccgattgctgtctcgtttgccttaaattcctgctccagtttgtcgagttcctctttcagtgcctttgactgctctgaatttgctccggtcgcctttgttgaatcctcataggctttctttgctgcctcgacctttgttttcaattcctcctgctttgtcttttggtctgaaagtttctgtgtgagttttgcttgttgctcactgtttaattgaacgatattcttttgcagagtgattttttgagtgaggctctcggctttcgccttgagttggtctgctgccgaaccgaacgcttttgcttgcgtctgtgccagtttgaactcactggataacactttcatctgtgacgcagcggatttcatttgtgactgataatcagacgaatttgctgaaatcttcacgcttgtatgtgccatcggttctcctcctctctactacaatatatttatggttaatatcccttacagccagtaaggaattatccatcttgttgcttaagctgttgacgtctaattttcaacctgtataaaattttcaaagttctttcattttagccttgactttttatttgcaggctgtgttatgtgttctcgttcaccgtttcaagttcaaatttcagatatttcagcagttcaatgatattttctttcatgcactgcccgtatgattcccgcatgagccgaatcgcaatttttgtcacacggtcaacgatttctccgcatatcttccatgtgttctgttcttcctgctcctcgtcctcatacccattctcgcggtcatattcgtcgaacgcagatgtctctctttcgattggctctgtctcgacaatgttcagcaacgcatcggaaacaatatcctgcatgatgaaatgaatcccctttgatgctgtcagaaattcaatgacatccacctcacccagttcatcgagagacatcctgtttccaaatatctcttgaataattcttttgttgaaaaacagtgcatccgttattttgtccgaaccgtttttctccatgagtgcagcatatttcttgtactgctcaaccgttatgttattgatgaatacttttcctgtgctgcaagtgattgttatttccggaatcacttgccactctgaaaatttttcatcatcttgtccattctcttgttcatttcctctgcgattcccatgtcaatcatgttgaactcgatgacgattcctgctgcatccagtccgctctctgcgtcctttaactcgtcaaccgtgaactgatttccgtatgctttgcagatgaacaacatcatcgcctcaatttcctgtcgtgagtatctttttgacgctctctcggatgtcgcagcgtcaatctgttctgcaagttcgagatattccatgtatgtgtccgcagacattttctccattttgaactctttatgattcacgataatttttctattcattgaattatcctcctgttatatcctctcttgttttacgctgctgcgtccggtgcttcctgcacttttgagaaccagtctttgattgctgttgctgcatccgtgtcctctgctacaaggttggattcatcaacagatacctcatacagattgtcgatgctacgctcgtagaaactgcccttgatgctcttggttgtaggtgacagttttccctctttagtgcttgcctcctcgctgataccctctgcaaactttccgacataaagccacttgaactcatatttcccgttgagttttctttctctccatccgacagcgacctccggtgctctgtcgtcagatgactttctcaagaatcctttctcgtacaactgcccgaacagaatcactctgtcctgcggtgcaagagcattgatctccagttcgacatctgttccctcgtatgaggtgatgacctcctcggtgttatcgtcggagtagattttctcacttgtccacttttcatcaattttcgctttgattgccctcgctaatttcaccggagttccggctgtgtatgctgttgcagtattgctctgcaccagtgcgatgtaaaaatctttcagaccgcaagttctactccttacaatctgctgtgtggtttcatttacctgtgttactgtttcgctcatgatttttcctcgctttcgtaatattttgtgaatcgctgtgctttcatatagattccatcctccggttttgaatcgtctccgtttctcccctcgaatgagaacccattctctttcatgagagacttgatttcccttgccagttccacctcgtcctcttttgagaaaatggtgacttgcaaggaaagtgtcactccctccgcatcatcatccgaaaaattatcatcggtttcgcccaaatcccacaatgtcacatgacatttgttgaggtctttgtcataccacccctgcatcacggtgattcctctgtcctctatcggcttgagtacgtctgatgcgtcttttatgatgtccggactgctgtccatgcttatcaccccactgtcctgtctaaatacgcttgatattcctgttctgctatcttttgcagttctgcatctgcctccctgcctgttgcatatatgaactcttgtggcggtctgtaaatcgttccccagttaataaagcggacgtagaaatgaccgccctcgtcctgtgtgttcttttcccatccgacatctgctgtcgctcccgtaccgttcacctttactttcccgatagggatttcatctgctgcatgtgcggacactgatgattttgaaccgaaccctcgcccactttttttgatgtcctttgactttgggatttttccggacatgattctctgtacaactggttctcctttttcagcgatcgctttatttacctgtgcaatatcttcatccgatgcagcactttcaaacgcttttaccagttcctccagtcctttgaactcaatgtcaattttcatgtcctcacctccgtgtcagaatgtgacacctatgcaaccgcacgacatttcacaagcacccatccgttatctgtgaacatcggtgatgcgtcatagatgtcgaatcgtgttccgtcatactctgcatagaactctttcattttctttctgacctctttcatccgcttgcaattccgaaccttgaaaacaatggtgttctcaagacctgcttgcagtgctgtgtatttctcatttgttcccaaactctgaacatcgcaccaacactcataaaacacctctgtggtcggttctttcctgccctccttgatttctgtggtcactctgattattttcacccgtccggtcattcactgctccctccatacttttcattgagtagcatggttgagaccgcatttgtgagttgctgtgtaccgttctgatacttctccctgtggtcatacaattccttgacgaaagaatatacaagcaatctctgacgggcggtcaaattgtatgggtcgaaattcggaatcagttccatcaattcctctgatgcaatcgcctcaaccatagtctctacaatgtccttgtcgtcgtcatagtcgatgtgattgtatttcatgcagtcctcaaccagtttgtctctatactctttcttttcctcgtccgtcatttcattcacctgctttcaatcgcagggcgggtgttcccgccctgctgcatttcttatccctgcacaacttccgtgatgttgcctttgatgattgctccatcatcaacaggctgcacgtcgaaacggtcacgaaccttgattccggtcatgtctttctcccacaaacctgctgccttgtcgttcatgtcgattgtgatgacatttctgtcaaataatgtgatagcctcttttaagtcgcccatatacacaggatgcttgtatgcggacacctttgcatcgactgtcgtttcctgctcctgtcctttgcaagttacaacatactttcctttcacgactttccatgctgttacgtcggacgttgctgatgcgtcgattgctgtggttgttccgtcgattgctaatttgctaccggagattgtgaacgcaggtgagtacactggttcagatttcacagtcctgtttgacaccttgacaatcggatatttaccgaacaacatcatctgtgtcggctgtgtaggattcggctgcaaaatgtactttccatccttatcctttaacttgtcgaggtagttgtacccgttctgatttgcgatgaccattgctccggttgtgatagcagggtcgagacccacgttgaacacgtccttgaggctgtcgattgtggaaatcacaacctcttttccctttgtcatctcgtccgcaaccttgagaatcatcgcatttcttgtcgcctttgttttcttggcaatccatttgttgatgtatgccatgacattggctgcggtgtcctcaaacagttctgcggtgatttttaagatgccaccttttttcttgattgcatacacaatctttttgaacttcggctcatccatgtcgggaaaatccgcctcctcgtccacattgtcgaacggagtggaatctgcatcgacctcaatgtttcgagaaccgctctttgtggtcactccctccacattgacatactgctccagattgtcctctgaacgtcttaactcgatgatgtctgttctgatgtcctccgggacggtgacaccgattcccatttcatcatcgtctccctttgtggtgtctgtgcttaacgcatccttgtacaccttgacatctccctcgtccggttctctctttaagaatccgcacttgacgatattgacgaacgctttcacgaggtttttcttgtctgcttttgccccgatggtctttgctgttcccgtcgccaccttgtcctcgatctcctcatgttcctcctcgtccaaatcgaacaggaggtcaaacttttcctgtaactctttgagttcctcttttgctgcctttgccttgtcgagttttccatcgttcacaaggctcttgacctcattctttttgtcgttgattgctttcaacagtttctgcatttccttgttcatgaatcatgtcctctctttcttaaattccatacatgtcgaggtctgcaagaatatcctgcttttctgcctcgattctctgtttctctgcctctgctgctgcattgttcctgttctccagttccgcaagcaccgcatcgacaatgtcctttgtggctgttcctttgatgctctccggaacatggttgtatttttcaaaataatctgatgcacacgctgcgactgctgccttttcatcaatcaaaacgtcgaaatactctgccagttctgcaccgctgaaccacttttctttcgccatgaaagacttgattttgtctctcgtcacaccctctttcaagtgttcctcgtaaacgtcgagaattgaatcctcgcataaatcaagttgtttgatgacctctttgaaatcgtctgcgttgccccatgccatacataaaggcttgtgaatcatcgcctgtgctcctgtcgcaaaatgcagttcatcacatgcgaacatgatgacagatgcgattgacgcagccattccatcaacatatccgactttgtgtccggagtatcgtttcaactggttatagattgccagtcctgcgaatacatcaccgccaccggaattgaaatagatgtcgatgtcctcatacccatccaactggttgaggaaatctgcgatgtcctgcgggcatctgtcctcctcgaaccacatggattcccatgttgctgatacaatgtcaccgtagaaatacaaggaacatctgctctgttcctcgtcctgttccaaatccaaatagccgacattttcaacttttccgctgcgtttattcttttttgtgaaatcaaaacgtcttttctttgccatgattattcacctccctcctgttcttcctcgtcctctgcctcgtcggtttcgtccggttgtcctgttgtgtccggctgctctgtgtccggctctgtttcttcctccggttgctccggtttttcggtctcctcttgctcgatttgacctttctgatatgctgctcctgccattgtcagcggaacgatgctgccatttgcaagtaaagtgtcgccaccctctccatcggggaggtcaagtttgcgtcgtgcctcattcggtttcatgattgagccactgacaccgtttttcaggtattccatttgtgtctttgaatctgtccggaaaagaactttttcattgtatttgtaataaaaaccgtcatcctgttcctcgtccgtcagcattttatagttgatttcttcctcatactgcttgatgacgaacagttctgtgtcaacgtaaaaagacaactgctgcaactcactgttcgcataggacgactttgaatagtcgttgatttgattcggtttcacaccgaacgctgctgcgatctgcaatgcagtgtattttttcaattcaaagaactgtgaatctgacaatttgatgtcgagtggtgtcagtttcatccctaacggtacggggatgatttttcctgtgtttctcgctccgctgccgaaatcctcaaacgatttcacgagtgcctcttttgctttatcattcaactctcccgtgtattcaagcgtcgctttcgctgtcaatccgctttcatacaagctgttcatgtacctctgtgatgccgatgctccggagattgtgtcacggagaatctgctgcactggtaaacccgtcacaccgtcaaaactgaatgatgttttgaagtgcatgacctcactcgtgtcgaatacatactgacttccggatgtcgggtctgtgtagacataccacaagcgtccttttcctgcgaatatgcctgcatcatccacaacaatctgaacacaattcgactgcatcacccacaggtcaagaattttgacctctcctccgtatttcttccggatgaatttctttctcatgtacacataagcgttcccgtagtgattgcggttgatttccactgtgttccaaaataccgtcggtgtcatgaacgggttcggtctcttggtcagcagtctcgacgtgtccgtctgttctgcctcaatgattcctttgtccgttctctgataatatttgataggcattttcgcaagagtttccgacagcatcttgagacatgtgaaatatgtcacctctgatgttgtctttctcctcctgctcaaacccatgctctcaaggaatgacggtgagttgagcgtcatcaccccgcctgtcagttccgttgaatcactgacctccggtgcagtttcacctttccaccagttcatcaaactgtttgctatttttctaaatgggttcattctttctcaccgcctttccccatgtatttctcatacatttcaagccattcattcacaacctcatttgtgtccggcttgtactcctctttcattgctgctttccatgcgtcgatgattgcgtcaatcgggtcgattctgtcctcgtcgagtgccttgtcgattttgatttcaccgtaactgttcgagatagtctttgcgtttgcaatcgaccacgtcagcagttcatcgaacggaacaaccttgccttttccgacttctgttccctcaatcacgacgtttcctgcttttatctccagtctgaaatcaactgttgcgtcattgagttcctttgctgtctgtgtaattgccacagaatcgaatcccagtgcctcaaggtctgacaggaacgcagatgcgttgtgtgggtcataacacacaagttgaggtttcaaatcattctgtttgattaaatcctcaaggtacttgatgatgtacttgtaatctgtctttattcctcccagtgtctccgtgactgtcacgagaccttttgaaatccatacatcatacggaactttgtccgtcttgatatgctcgtccactctgctcgcaggtatgaatgagtgagtatgcacaaaatactttttcacaccgtcaatcatgtacgggatgacgattgcgatggatgtcaagtcgcctccggacgacaggtcaactccgacatagcattttgagcctctgaaatccttgagcgttcgcaatgctgcacatcgtttccagtctttaatgtccttgatgtacagtgcgtttgaccactgcatccacatgtttaactgcttaacgaggaaatctcgcaaatcctccccgcccatatcacgggcagtattcgcaaccggaacgagattctccagtgcatcctcgtcatattcgagaatcgggtttgcttttatccagttctcctttttgtataggtcatccgctgtgtccaactgtgctatatacacgaactgactgtcgttctcaaacacacctttcagcagattgcagcaatactcatataacttgtagcaaggcgatttcaaatcgaaccccgctgtcgttatgacggagatcagtgcggattttaatttcttgatacctccctcaagcagtttgtacatctgatttgtcttgtgagcgtggtattcgtcaacgattcccaaatatgcacggtgtccgtccagtgacttggtatctccggataatgccttgatttccgaatgtgtacagagacaatctatcgtgtgattatgctcatgcaccttgaaccactccgacaaatcctcgtcggaattgatgaattttacaatttcatcaaaaacaatgttcgcttggtcttgttttgtcgcagtacaaaagatttttccgtatttgtacccgtcaaaattgccatagtaacacgctaaaataccattgatgaacgactttccgttctgtctgcctaactgtacataggacgttctgaaccgtctgtgacccttttcttttgtcctccacccattcagagaccctaaaatgaaacactggaacgggtacgctgtcacattttcctgttcgtcaccctctgcgattgtcaattcttccgcaaaattgatgatttcctcggacttttcaacgtcgaaataatatttgtatggtgctgctttcgctttttcgaggtcgtcaagatgcctttgacatgccagtctgacatattcacctgcaatgatgacacctgcaacgacatcaagagcgtattgtgtgcaacggtcggtcactgttgcccctgctgccatttatgaactcgcatacttggcgaatttgttctccggttttgtttcctttgctttcggaactaccaaccgacaccgactgctgaccgtcattccgaaatccgatgccccctgccgacattgtttcatgcagcggtcttgtataatcatgagacgctccctctcaccgttcacaacctcccgtgttccgacctgtacacgttcctgttctcctgtgtccggattctctcgcatctcatagaccggaacatcgaccatcaacggagtttctctgattttgtccgttatctcgatgtattggtcttgtgcaatcagtaatctcgccagtgcatcacaatccacgttcgcaatgagtttgattgcaagcagttcttttgacaatttccggaatttcttcttttgttccggtgtcaaatatgccggaggcttgactttgtcgtttggggcgaccacctccgcattttttctcgcctcaatctctgcttttgtgaggtgtttttttcctttcatgaccaccaaatcggtcggttgtctctgtcctgccatgcagcatcaaccccctttccgtccagtgttcacgagtttcgtgtcacattctgacaccttttcgtcactccctgcgtcttgattttctcgtggggagttttctccaaagaaaagaggggtgcgactaagaaacggtcacataaaactttttcatatccccctgcctctttgaaatggtaatcaatcagcgacctcaactgtgtctgtgttgctttcatgcttgcattgctctgtttatatagtgctgtgattgtgttgtgtgtccgatggctcaagggtatcaagttcaatgggttcaacctctgctcccagtcctcctcaagttctatgatgtggtggattgggtctgaatctttcagtgttatcaactggtgttcaacatacagagcatatatatccacatactcatacacgctcatgatgacaggtctcaactcccgccattcctttgacagatagaactctgctgctcgtgggtctctgcgtgtattgttatatgtcacatgccttgactgctgccttgcctcgcactgctcgcacatggtcaatgcctgtgggataaggcgaccgcatcccttacatgctttcaataacacactgctcactcctctctgtccatcggtctcctgctgcctctcatgcctttcaagaggcgggcatacatcgcacatgatagtgtcctgctgcccgcatataacaggagggcaaacaggcaagaaaaaagctactgcatctctgcaatcgctcactcaactgttcacgttatcatattagcacgtttatatttgcttttgttcacccactttttacccccgaaatcaccctcatttcaccccgttttcactctcatttcactccgattttgtcattttcgattgcttttgcaccgaataatttgattgagagacgttctgtcattgatctgcaccactttttcggtgagttctttccgcatcctgtctccctcacaatatcctcgtatgacttgcccttgatatatactgcctcaagtgcgtcgtacttgtacccctcacctgctgcctctgcatcctctttcagcgatgcaagagcctttttcatgtgctcgaacagaatgaccgtctctgccttacactctctgatggactggaggaacgctttctctgctgaaatgttatatcttgatacatcgtcaatctgtgatacttccgaaattgcacccttgatatatcgctctatttcccgataattctcaagatatacctgtgttttctgaattgctgtcatttctttttctgtctccacgtcgttttcctccttttgaccttttcagaggcaatccatgatatttcctccaattattcgacttttcctgtctcctcggtctgtatatgctctcaaatgcggtcaatgcctcttttgcactgattcccactttcaaaagagcatcttgcaggttttctcctcctgctgccttgattttctccggatgttccggagattccgtctttttcaagaccgttgctgcctctgctgcctgttcgatgatttcagacacctctttctctgtctttcccgttgcccgcagttttgaaatgacgtttttcaccttttccacgaatcccatatctccatcctcctccgcacctaattgaaagggagttcttcgtcgattccgtccggaatattcataaaaccgtcacctgcatccgaataccctccgttgttcccgtcctgctgccctgctgctttcttactctctgcaaattcctgttcctcgacaatcacgtccgtggtatagaccttttgaccgtctctgttcgtatatgaccccgtctgaatccgtccagtgacaaccactttcgttccctgcttgagatatttttctgcaaactctccatctcgtccaaacgcaacgcaggaaatgaaatccgctgactgctgcccgtcttttgctcctctgcggtcaaccgcaagtgtgtatcgtgcgattgccatttcctcctgcgaattattcctcggtgaatatctgacattcgggtctctcgtgagacgacctatcaaaatgaccttgttcatccgttttccctctctttctgcaaaatatactcattctgtgctttctgcaattccgtgatgccctttttgaactgtgcatcatctccattcatgcagatttcaaacaattcctcgtacctgtcaatattctcggtgatgaacgctgcctctgcctttgagcgtctctgcgtgaggaacattcctttgattgtctctctcatggtctcgcagttctgtctctcctcctccgtttccggaggagtttctttcagcatcttatcgacaaccctgtccaccgcatccgcaatctgttctttccatccggatgacgctttttcatcaatgagttgtgactggatgtcctcgaacgatgctcccgctgctgctcccgtgattctgatgtccttttttccttttgctgcaaccagaatcaaatcatcgtcatacgctgccatgtaatagtcgaattttgcattgaaattctctttcggattgatgatgacctccggttcactgctaccctctgtctgaatcattacaccgatatatttctgacctgttccctttgcctcgatgaataatgcttttaattgtccttttttcaatttcctgttcctcccatagtcagcagcctctcaaataactgctcatatagtgccttgaatgtgtcacgctcggtctgaaccttgatgatgtcctctgattgtctgcttgcatcaactttcctgttctcctcgacatacactgctgcatcctgttcaatttctgcgattctgtcatcacattcctgctgtaacatctcaatttccctttttaggctgtcgatttcctcctgctgcctctgtatcgtctcattgtactgctttgatgatttcccgccattatccaactgcaaggaaatcatgagagcgatgtcaatgtttttcatttcctgctctgatacctgcccgatatagttattcacacgctcggtcgataccgacgacacctgttcgcacaaaactgtggatattcttccggtgctgcggatagtcacatgtgtcgggaggtctgtttttggctgtgtcgtcatgtacacaacctcaatcactccggagtgtttgttgttctcgtcattactgaccacgactgcgggtctgtctgcaaactgctcactcccgttcgtcgcccccccctcgtgcgatatagaatatctctccccgtctgatgtcatccattgtcttttcctccttatttcaccgtcatcattcagcatcctctttcatgagtgatgttgccatgatgcaatatccgtcctcaagacctgcaaactcctcaaggatatatgtcacaagcactctcacggtgcgtcctgtgttctttccgtccttgaactccatcatctcaaggatgtcgccttttttatagtctctgtcattcttccggagttcaaatgtcttttctccggatgcaacctcctcaaaaaatgtcgctcccagtttaatgtgatgcactttctgaccgttctcctgtgtgtctgacgggaggttgttcatcttctcctcctctgcctgttcacggagtttcttttttgtctcacggtcgattgcatcctgctcctcgttatatctctgctcctcggtcttgtaagcctctgcacggttcttgtactggtcgcatgaggtacatgttccggtctttacgttgcaagtctcgtattcggtgcaggaatagcagattgatgtgattccctccggatgcggtgtctcataatcgtcgcccgctttcttttcctccggaggattcatgctgttttctgatgactgctgccctgctgtgtctgaatctgacacggtgtcctgctgccctgctgcatcctgctcctgttccggtttctgcggtgatttcatgtccttaatttccgtataggacaattctccgttttccttgtactttgcaagtgcctcctgctgcatctccggagacatcccactcaactcatacgctgcggagaatgtgagacgctcgttgttgagttcctctcgaaactccggaatcaaattgttgttgacgctctcaatctgtgcgatcttggtctttgacatcttgagcattgaggcgatgacatcacggaggcgaccggactggaggtcatatcctttgattttctttccatccgttttcatacgctcaagacacgctttgagacgctgttcctcctcgatgacatccttgagagactttgtccggtatgcgtttgcgatgatgatttccacctgctcctcgtcctcgtcctgcggtgtggtcagtttgcaggtcgcaatctcaaaatctttatatccctgctcgacaaggtgcttgagtgcaagccaccgtctctcacctgcgacgattctatattcaccctgctcattcggctcaaatacaacctcaagattctgtttgagaccatacatgaggatgtctcctgccagttcctcaatatctgccaaatcgtagaaattgagtttgttccggtacatcttgaaaattgaaatgtcctttgtccggaatctcgccctcggtgattcgtcaactcctgccttactgttcttgttcagtgcgtccatgacgctgaatcctgttgccatgttctttcctcctgttttctcccgtcagtgcggtcacgatttctttgtattccatttcacactcgaaaatctgtgcgtcgagtgcgtccaatctcttgtataactggttttcaatgcttttcggtactttctcgccattccgcagtaatataccgattatctgatatttactcttgcaggtcagttccgtcaaaatctgaatctgttacttttgattctctgctctccggaatgacccgcatatctctctttcggtcacacgcatccgctcccctattctgttagtttctgctttttggtctctgtacgctcgacgtttatctcgcctttgctattctgtgatatagatgctttgaccccacctcggaggttcagagtgacctttgccagtcctccggtgtatatctcctcaactgctgccttgagaatgttcacgatgccctcactgcatctcttttccggtgctgctgcctctccgaacaatgcagcgacgttctgcatcgccttttctttcctctgtttctctttctgatactcaaccgcctgttcgcaggtgcaggacattgtcgcctgttcctctgcctgtggctgtgtcaatttctcctcgctgtcaatctgcaccatctgtccgcagaatcgacacggtgctgtgttgatgatgtttcccatgttcaatcctctctttctgtcgctctcatgcgacctcctgcaaaattatctttctgaatatgctctcaaatatcggaactgcaatgctgttccctgcttggtcatataaagccttgtagtatttcccgtttctttcttgaactgctttcgccctgtcaaaatcctcgtctgaatatcccatcaatctccaacactcacgctctgtcaaataccgataacgtccatctcctcggtcgatgacctgtgcaggtgtccggtcttgccttgttgtgattgtatatgcacaatctttgatgaccgtcgctctccggattcctttttctccgatacatgcaaggacggacggttgtgtcacatcgtagatgtccggaacgtcatcctcaaggaactcttgcaggtttcgcatcggtgtccttatgaggtcatcgaactcaaatttttcaccattcagaacagaaaccgtgaacactctttctctcgcctgtggcaatccgaactctcttgcatctaaaaccgcataattattcgtgtaccccagtttttccatctcgtccatgtatctgtcgaaattcggtctcatgtactttgatttcacattcttcacgttttcccatatcacataacgaggtcgccattctcccatattctcaatgatatgtattgtctcccacatgagagaggaacgtgttccgctcccctcgtctgaacctttccctctgttgattcttccgtctcctgtcgctttcccttgatgtcctgcgatgctcatgtcttgacaaggcgaaccatgaatcaaaatatccggtttcagattccatccgacgaccgtctgtgttttatattctaattcctcacggaacatcgaattgtatgaccggactgctttttcattgatctccacatagtcgattgcttttgttgggatgttcaaatttctcaaggcacatcgaggcgaaccaattccccgaataattcaagaatctgtattgtatcgttcatgtcctgctgcctcctgttcctttatcattaaatccggacattcacgacagtcttaaccgttctcctcgcactgttcctgttcgtgttccgtcacatcctccatgtcttttccgtaccatctgcaaaaaccgctcatgttcaaatctcctctctaatcaaaatcaacgaattgttccgctttgaatcggtctcccatatccatgaaataaccgtataaaaactctttctgttgctttgtcagatttttcatgtttgtcactatatatccggtatatccggatggattgtgaatcaagcaatatccctttacctctgatagaaaatctctcatgagatggttaatttcattgcctctattttctttcacccagttccaatattcctccgtgaaccctttttcctcacagatttgttctgctgattcctcatgagttccgaacggtgattcagtgaaaactcctgtcggagacaaccacccaaactctttttcctccttgtcctgctgccctgctgcgtcctgctcctgctgcatctgtggcattattccattgttgaaattttcaagatgctttgaaagcttttccatgttcatctcacgctcaatgatttcctcgtatttcagaggttttccctctttcccgtccttgagcatgaccatccggcacgttccccattccatctcactgaatcccaaatcgtagcactccatcacataaaacaatcccgttttcaaatccggattcatgcgaatctcgaccatgtcaatgaaatttttattgtccagtgcatcccatacaatgtgaaagtaatatgcaaaacctttttcaaacgatttgcactttcccgaaccgtcaagtgttatgcaggtgtcgcatcctccattagtgtgatgtttgcatgagctgttgttgcatgtgatttttctctttcccacgctcacccctccatttccttgagtaactcatgaaccacattgcgatagtcctgtgacacgatgcagttctttgaaaactgtgggaggactgccattctcatggatgccttttccgctacaatcgaccgacgaatcggtgtgacgaacatgtcaaatccggaactggttttcatccactcctcgaaatccagtgatgtcttgtttttctgtctcatggtcacaagacctttgattcggagttccggattgatttcccgcaggtcgtcaacctgctcctgcaaattgtgaatcgcctcgttttcatatcctccgacctttactggtgcaatgacgagttctgctgccagtagaatgttgatgaccaccatatcaagcagacgaccgcaatcacaaatgcaatagtcgtatgcctcggatatttcctccagtgcatcccgcagcctcgtgacttgatttgcctcctgcttgagcagcagtttcatgtctgtctgcatgagatacccgtttgcaggaatgatgtcaatgtgactgtactgtgtgggtcttatcaagtccgttgtccggtatgacccgcccacactcacatgacgctcaagcagttcactcattcctgttccctccggctcgtatgcctcgaatgttttggatgtatcgccctgcgggtctccgtcgagaatgagaacacgtttctcctgctcctctcccaacatgtaggcgattgcatccgatgtcgttgtctttccgattccacctttcggtgacataactgcaataattctcattttttctgttcctcctgttatcctcttgttacctgttacatgaaacctctgtcgtccggctgtctccatccgcagcggtgcaagtgcatcccctcgcccaccttgtagagtgtatatgtgacccctgctcccagtgctatgacaacgactgctgccacaatgatgattttcctcacgtcctcacctccccgctatatcgtgattgtgtggtatatacacaactgcaaatctctgaaagaatagtccggtgtttcctccggtttcatcggtgcaatgagaccccgttccttgtatttcctgtgagtgatctccggaattgctcggaatctcttgacctctgcatctcctatctgtgcgacgatgtccttgtcaacctccatgtttgcgaaatactggttgtatatctcctcaccgtccttgatgacccgaaccctgtccggactttcaagcaacgtcataacatccttgaccgtcatcctgctgcacctcctcatttctttctcggtttgctctctttgatttccccattcttgaggatgctgttgttcggtatatccatgaccatcttttcgattgcgtcctgctttccactcgctcgccccatcacaatcatgacatcgttcatcctccaactattgagagataaatatttcttgatgacctcgattgcctcctctgcggagtagcaggtcgccacgaaatgacctgcctctgccatgtctttgaggaactctttctgtgatacctgctgcctgttgtctccgaacttcatctcgatgtatagtccgcaataaattcctttcggatatggcaagcaaaggtcgctcactcccgccttgacacccatctgtttgagtttcaccgcctcctgcttgttcctgctgcctccgttcggtacatggtgcagccatttcaattccggatagcggttcatgttccagttcgcccatgacacgacattgatttgctccgtgtcctcacttctcattgcatatctcatgttcattctctttcacctctttcctgctgcctatctcctgcttgcacatgtcataatattcgcagaacagacacacatgtctgcaatccttgaccctcaacatgtgcagaatcctctcaatcacctgcatcttgctccagttcctcctcgatttctttcatccggctcatgatggtctgattgtactcatacacatagattccgtttttccatagatgttgttttgctccctgctccccgtagttatacgctgcaagtgcatcttgaatcgttccgtatctctcaatcagttccgacaggtaatcagtcccgacgagtacgttctgatatgggttcgtgaggtctgtgacgttcagacgctccatcctgtctctgtggcactcctcatatatctgcatgtacccgatagaatgaccatcatcaccaaccttgtcgaatttatatccggattctttctcaatcagagcgaccacaaggtcatatctgaccccgtactgcttgcagacgcaatatgtatatacctgcatcttttccggaaaatagccacctgtccgactgtattcctccggtatctcatagagcacgaatccatcctcctcgcctccccagtctgccgacatggtgtcaaatactgcatacttgtccggttctgtgtcctgctgccatgttcgcacctgctcaagcattgcattttgtccggatgcctctcttttctcgtcgattctctgcatccgtgcattgaactcctgcgactgctgctcatactcctcaaattccttgtcatctcgcatgacagagcgtgtcagacctatgctcacagcgatcgccagtaataccatcaccgcaatatatgtcagttcccgtctcctcctgctcattcttctctttctttttgctttcattgctgcctccgtttcctcattctcgcccgtatgtagaacattgagttgaaatcgttgtaatagattcccgcatccgtaaaatcaaaatccggataccatttcaacatctgctcacgaacctgctcatgtccttttctcatggtctcgacgtatgttccgattttcttatatcctccggcttttgctgtcggtctctttgaatgaaccaccttgatgtcggggtctctcaatccctgtgaggagttccaccgtttctccgatttcaccctgttcttttcctcgacgatatactttgccattcctgtcaaaccgttctcgtccttttgcagcctccgaacctcgttcctgctgctctgtttccaacatccctcaaccacatccatgtccatgtcgccatccatgacaatgtgatgatgccaccggatttcctctgtcggattgtaggcggtcacatagacatatcttgcgttcgggagaccccttttctttctctgataattcacccgtcggatgaatttctgcacgttcttgattgctgcgtcgatgtctccgtccggagggagatgctcattgtcgtatgtaaacgtgagccacaaatctctgtccgtgaaattctcattgataagacgctccacatatttccttgcgttcttgtcgttcagattcctttgagccttgtcattgtcctttttgatactccgaccctccggaggtacttcatccattttcttgaactgtggatatatctcaacctcgaactggtctcctgctcgtatctccttgagtgcatatacaacctttttcccatgcttgaacatctgctcaacaaaaaactcattcatgtcctcaaggctcttgttgtatgctgcctcatagtcatacgggatgaacgtcatccctttctttctctttgccattctgacaccgttcctcctgctgcccttatatatacttttcaacgacttgttactatccatcacaaggtcgtcaaaagggtctgaaaccctttgaatcacggggtttcccccgctttttcatgcttgcaatatggtgtcagatttgctataatatttttaggttttaagcgtctgacacagactgctaaacgggagaccgctgcaacggtctcctttctttttgctcttttttctcatgctctgcatattcattttttaggtgtattcctcgtaaatcgccccctccgtatcaaacacaagtcatcctcacgctgttgcaaccgctgtctttccctgctgctcccatttctgacgttcctcctgttttcctgccatatatccggcaatataggacttgtcaacgtcatccatctgtgtgaaccgctctgcgatattctcaatcatttcttttctttcatcctttgacatatatgtcacgctcctctctttcctctgattctctcaagttctgcctgtatgtcttttccggaataatctgcaagcagtttctccgaaatgtgataagtccatattgatgacatctgcaccgctgttccgatagggagtttcccttgctgcatcgctattcggatgaattgcggtgatacattcaatatgactgctgcctcggttggcaatatacgtccgacttccatccgtctgacctcctgttctgacctgccttgtcaatgcgtgggcggtcatcccacacagacgggcgactgctgcccgtttcggctctcaatagtcatcctcaatctgttcgtctgcctctgtgtaatattccccgtcatatccctttgacatgattctctgatagcatctgtcacacaccagtctgaacgggattccatgacaatcctttgtgaaatacatatcctcacgatcaacctcatgttcgcacaccggacatgtccgaatgtcacgctcctcgaatctgcatgacaacccgttctgtctcctccggcaatcctcgaccgttccgtctcgtcctgtcatgagttggtttttgcagatgtcgcaatcatttccctcgttgaaatatttcatttcctgcatcctgtttcctcctgtggaggctctctcggtctgttcatgacctcgcctctgttccggctgaatttaccgtgttgtgtcttttcgccttaaaaagtcaccgaaaacctgtcatccaactatgaaccttttagcaagttcacccgctgccatgtttctcacggtattccgacgctgtctttcggcttgccatcgtcagagcgtcggtcgccatccggacgctgacggggcgactgctgccccgtttcggctttttcttgtcctgttttctttcctgccctataatgaatgtgcgaccattctcaaatgacaggaggtgaaacaatatggacgatttgactaaggaacaaaaacatcttcttgtttccatgtataaagaagtattgaaccgtcaacctgctctttcgatggaagatgcaaacaagttcgacgattccgaccaactcattgaactcttttctctcaatgcgtcatccgactacgtctctgacttatgttggaaactgcattcaaagggatatatccagtgttattccggagatgaccttgcgaatgatatttctctatctgacaaaacgattgtctgcatggagaacagattcaaaaacggtctgaaagatgttctttcttttctctctaactttatttaatccatggaggatgtttcatttcttgagacatcctctttttcatagaaactcccgtttttgcatttccctcgtctctcgaaattcatcgcatggctgatgtcagtcgtgtgtctgcaatctcctccgtttttataacagtttcttttcttgcaattttctcgttctccatcgcagagataaaaaattttttccatcttttcgcctcctatctgttgcctttggttacattatagtgaccgaagttcaccttgtcaatacttttttgttgcctctggttacttttttattgatttttgtcagttaccgtgctatgctttagaaaaaaagaggaggtgattctatatgacgcagggtgaacgcataaaggatgtgcgaaattctctcggtcttacacttgaaaaattcggtgaaaaacttggtgtgacgaaaactgcaatttcccgcatcgaaaagggtgaacgcagtctcaccgaacagatgacaaaatccatttgtcgagagtttagcgttgattatatgtggctgactactggagagggagagatgttcgtcgaatccgacgacgacttttttgaaagaattgaccgcatcatggcgggtgagaatgaatctcgcaaaaatatgataaaaactctcttgtatgcctcggacgctgatattgaggcatttgacagacttgttgattattacatttctttgagagcggataacaaaaaagactgacagtctttttcaactgccagtctcgtgggtgtacagatataaaacgaatttatatatcctcttgaggactttttcgctttgtatcttaccgactaactcaatgatagtctctttgtaatgcaagggaacaccacccctttccgaaacacatcatatcacatatttccatgattgtggaaatatcggagttcatttccataattgtggaaatcgtctcccgttcccactcacggaacatgtcatgtgatacaattatttgtattcggattcaaacaggtcggttattttgacccccagtgcaatcgctatcgtttcgagttgaaacaatgtcggtgacaccttaccgttttcgatgttgttgagcgtcgattttccgattccggatttcttcgccaactccatcaacgtgaacccttttgaggttcttgtttcccataacaaaactttcatcctgctcacctcctttcgcaaggaaaagtgtacaaggtgataggtttgttctaaagaatggaggtgttttgcatgaaatacggtgtcagaaaaccgaatgtcaaaaagagcataaaggcaaggactaccggaaaagtaaagaggcaggtcaaaaaggctgtgaatcctctttatggtaaaaagggaatggggattgtgaatgacccgaaaaaagctgcttataatgcagtgtatagtcgaacgaccgtcggggtctctgatgtgatgaaaagtgcatcatccggaaacggacacacatccgcatcctatgacgcacctgctccagtgaaaaaggaatattccgaccggacatacaatgtctgtggaattatcctcatggttctcgctgttgtgcttgtgcttttgggattgctcctgctgcttgctgttcctgttggcggtgttgctgccatcctgttgggtgtcggctgttttgccatcggtcgcaagtatcggaaaattgtgaaagaacgctctgaaaaatagatttacacataaaaagacgacccgtgctgcaacacgaatcgcctttgtggaatctcttatctcatgccctgcaaaaagcattttgatagatgaatcctgcaaacaccattctatcataaaaccgtgctttttgcattggttttattttttatactctttttttaggatggtgattgaatgaaactaccgaacgggttcgggtcggtctataaattatccggaaaccgacgaaatccctatgtagcaaaaaagacaaaagggtgggaaattgaccctataaccggaaaatcaaaacaattatatataaccgtcggatattacccgacacgcaaagaggctctcactgcattagcggaatacaataaagacccctttgatttacaccatgcaactattactttcgaggaagtatatgagaattggtcggaaatccattttgaaaaaatcaaggacacgaatggttataaggctgcttttaacacatcgaaacccctgtggaaaatgagatttgttgacatcaaactggatcacctgcaaagtgtcgtcgatagctccggcaaaaacactcccacacttaaaaccttgaaaatcctgtggggtctcatgtatgactatgctgtcattcacgagattgtgtctcaagataaaagagacatggtcagatatgtcgatataagcaaggcgggaaatccgaacgcatacaaccggaaacctttttcaaagaaagagatttctattctgtggaaatgcaaggattcaaacatatatgtgaccgtcatccttattatgatttattccggtgtccgtatcggggaactcctcgaccttgagaaaaaggacatccatcttgatgaacgatggttctatgtgaaagaatccaaaacagaggcaggaatcagagaagttcccattgctgaaaagattgtaccattctttgaatactggatgaaccggaaatgtgaccatctgatttgtacacccgacgacgaaccttttcagtaccggaattattatgattcttactggattcctctgatgcttgagttcggtttcgggaaattcgtcattgatgaaacgaaaagagaacctgtctatgacggacaccgcccgcatgatacaaggcacacctgcatctctctcctcaccgaaaaggaagttgacgagagattcatcaagaaaattgtcgggcataaaggacagggtgtgaccgaaaacgtctacacccacattgaactcccgaccaaacttgaggcaatcaatttgatttgatggagggcaatgtcatgaacagaacagaatacaaaaataatttttataaagagcattatgaacgaataaacctcgcagttcctaaaggaatgaaagatattatccggacgctcgcagcagacaagggaatgtctatcaacgcatacattcaagaccttgtcagaaaagaccagtgcggaatgttcgacacgatgcaggtcgcagaaaagaacagggaaatgatttccggaatcactggaaacatgcacgacggatatgacatcatattcaaggacggtcattcctgtcactgccggacgaaaaaagatgtccggtcatgtatcattgaatactgcaaagaaaagggtgatttaatcgcccttttttcatgcaaaaatgtgtcttgcacaagatttcaaaagtattgcacaagacacctgttttcgtgttagttacctgtgtgttacctgttagttaccggaacattttcgtgtgttttgatggtgtctgatagattttcagaatataaagaaaaccccgaaaatactggattttcggggtttgttgctctttttcgatattcggttgaattatctctttgaaaactggtggatggtctgaaaccgcttcccaggctctccgtatctatcataaagtttatgataggagcatagtagtatacattttccaaatccttccgctccattaatttgcgtaaaactgcgcggcaatcacggtttccagtcataatccgatcaccgcttttaatcatatctgctgcctgcccggctgtaattgtcttttcttcatataatttttgccaacgtgtcatttctctcctcccggttatacaggggaaggggatattcacagaaaatatcccctccttcctgaagcttatattaatctttctttgcttcagcggcctccttccaggccatagctgcttttaagccctgttcattgacaatcctgttgaattctgcttgttcctgcacctgattaatacggcatagattaaatatttctgcggcgaagtccattgcattccgcatacccattatttcatatgtcttattgatttcatatttcagcatgcggatagattcagccggctgttcagccagacggtttgccaatttcattgtttcctcttctaactgctccaaaggtacaattctgttaacaactcccatatctttcagctctgctgcagtcataaaatcgcctaaaaatgcaagttctttggctttattcataggcattttccaaggttctattaaaacatcgtttacataggagtacttaagctccggctctccgaatttggcatcttcggaagcaataatcatatcacacatcagagcgagccatacgccgcctccgatacaatacccctgcacggaggcaatgaccggttttttggcatcccagagcgtacgccagttatttaattccatcagcgtattttcacggcggtcgggaacatttacaatggggctgctgatactctcttttaggtcgaaaccggctgtaaatgctttatcgcccgccgcacacaggacaatcacatttgtctcaggatccgcgtccgcccgccggattgcaggacctattccctctaccagttctctgtttaatgcattgcgtaccttcggcctgttcaaaatcacttttccaactttacctatccgttcgtatattaaaacttcctcacccataattgtatctccttcttattttgtaaattaacttagtaatcttctattcttttacctgatccgttaatctgcagttttcgatgtcttaggctgtgtacacaaacttactgtaacaaacgcaattgctgacggcagaatcgggaagatggaagaataaggaagattaacaccgcagaacttataaagaactacgaaaagtatgcctacggctgcagccgcaactgctcccggccgtgtggctttcttccagaagataccgcctacgaacataacaagtgtacctgcgcacaggaaagtataggcataggacagcatggaaataattgcctgagcgctcaacgcaaaataaagcaccatacagccgacaacaaatgtgacaacgtgtgccagtctgttaatccgtttctgatccgcatttttatcaatatactcaatataaatatcatttgtaaaagaagctgttatatagataagctgtgaatctaccgtcgacatgaccgctgccatcagagccgcaatcataatagctgccagccagcccgggaaaacctcaagcaggacctggaacataatactgctggccggagcatccgggaacagagcacggccatacattcccattaaaaccggaagaaccacaaacggaagaaggatcaagccgccccagagagcagacaaaaaggctgttttttcatccttggatgaaacattccgctggaaggaggcgcaggatacaagtccatatagcatagatgggaacaacatcataacccactgttccgtgccgaatggcattacagaccaactgctggcaggcagcgcctcagccataactccaaaagcccctgtcatcgccatataaagcatgcttagcagaacacatgcaaaaataacgcctacctgaattacatctgtcatcaaaactccccactgaccagacatagttgcataaataaatactacaatacaaacaagaacagctccgatcacgggttccatccccagatatgaaaacagatttttaccggccgtgatctggcccgccataatactcatggcggcaaaacagttaataacagcataaatagttccggtaatacgtttgccgtaacgctggttaagtacatcggagagtgtcagggcattggcccgatagagctttctggccaccacaaatgcgaatacaacatatcccaaagaagcgcctaccccaaaccaggcgcctcctattccatattctgccccgtactccgcacctcctacaaccactccattaccaatatgtgaaccaatgtaggatccacataccattagaaaccctccccgctttgcggcagttacgtagtctttaaaattgtctgatttgttccgtccatagtagccaatcgccagcattgcgcccatgtatacaaccaataccaccacagtcaatgttaaagtgttcatacttacctccttatcttctcccctcgtttataatccctcgaattgactttaatccccatcccctattaccgccttacctgagcaaagggcctaaccattcataatactgtattttgtgacaagctcctcgtcgataccgattccaaagccgggtgcctgcggcataggaatgcagccgtctgttatgtccggaaaataattttccgttaaaactccctggaacgctaccggtgtcagagtcggcggatcgcaaggatattccagccacgtaaaattagagtaagaggctactaaatgcatactctgcaatacgcccattcccgggatgtatgcatgcggatttacaattttcccgtaagtatccgctacggcagcaatttttctgatataactgatacccgtactcatcgtgcagtttggctgcagaatatcataacatcccttttccagcataatcttaaaatccggaatgccaatattgatttcaccaccggcaatcgggatatccacctcctcattcagccgggccaggccgtcaaaattgtatcgccacagaggttcctccaaccaggtacagtgaagctgttccaactccctggcagttcccctggcacgttcatagctccatacgggagggaatccattcttgtttctctcacaggcagtgccctggtttgcatccaccattatttccagctggtctcccactgcgtcacgcaccgcttcaatgattgcgatgtcgtcacgcatcctttcgttcgagaagcggattttaacagcccggaatccggattccaccaaccagcgggcatcctccctgcgctgttcattggaacgcagttctccccaggcggcgtaaaccggaattcgatcacggcaggaacccagcagtttataaacaggcaggccggcagcttttccgattatgtcccagcatgcattttcgatcacccagggacgagtggcaattcgggctacattgcgcagctttaacatgattgcttctatgtcaaatggcgaatctcctaccaacatagatttggcatactccatagtctcacagacaatcttcagaatcccgtgaggtgcctccatgcatgcgtatcctgtaattccatcatccgtatgtacacggacaacgaaaatcacctgcccccgttctgtcattcccggataccaggttggatggaattcctgtggaaatggtacttctacgcagtcataagtaatatttgtaattttcatttaattccccttttcctcctctctaaatacacttcttctgttgacaatatcatctggtaaataatgcttcctcctttgtttccacctccctcattatatccgtacttctcattggctttcgctgccattgcaagatcgcttatggagtttgattattcatccctccatacatgtataatctaattatacatgtatttatcgtaatgtcaacagaatattctaataattatattgtatttatattttataaggttgttatatcattctttatctaaatatatttcattaaaaagaagggaacattttaatttcacaggagaaattttctgttaaaaaaaggttagcagaatctgattttctgctaaccgaactcccccggtttcccggtctatcttatttttttatacttattatctcattaaagattctgcttacttccgctatatttattgtttctgataagcctgttttctcacgccctgaaatcttcccgatacatttccacaaacgagtggagaatcttcgccgtcatcccccagattacattttcaccgtaccggtaaaacataaccttatacctgcccctccgccagtgataatcctcaccgcccgggatcaggtcaaacggaaaatcttttcccggaatagtctgaacgtcggtatcatagcattccggctcgtgttccagaaaccatttaagaggaacggtaaacacatgatccacttcatccccggaaaatgtgcccttatagcctttcagttcagctaaaaacggataaacccccaaattggccggtgttatcagaatatccagtggggcgaccagatcgatctggctcttataaacgccaagctcctccattgtctcacggacagccgcctctttcctcgtctctcccttttccacggctccgcctggaaagcagacttcacccggctggcacttcaggacacccgctcttacctcaaacagaagatggtattcaccgtctttctccagaagcggtacgagtacggcagaatcaaagcccatctcctgatccagacgtcccggatgacgatcggcccagagacgcttcatcgtctttaccttgctgccctccgttgcgtgcaggaaagctgccacggcccggttgaattcgaagcttttttcggatgcaataaagtgatttcccgcaatcagcctcagcctgctgtcggggatgccgtagtatatccgtcttgtatggccgtttcttatcatatccttagtcccggcaatcaccaggaccggcatcttcagtctcttaagctcttccggttcaatccatgggcccttgaccataaggccgagcagctcagtcttctgctcaagcgaacctttatattgctctttcttacaggactgcctttccggtgacggctgcctctgtaacggaacggctccggctatctgccccggagtatcttttcgtttcacggtcttgcgctttttctttctcccggacggaaccgccgcgatttcagtgagcatccggccgaattgggaggctgctttgcaggccagacagaaaccatatccgacagttatcggaatctgtgttgccgcctttactcccagtggattcaagttcgcaccgtttaaaatcaaccggtccacatattccggataccgcagggaaaaggtgagggcaacatttcctccgtcgctgaatcccagcaggataatatgtctcagtcgtttctcatcaagaaatcctttcaggtcttttgcaaactgctctactgtaaatggccttgtccctctcggggatttcccatgtcctctcgtatctattgctattacccggtatttcttagaaaaaaaccggatctgattttcaaaatatgtgctgtcctctccgtttccgtggagcaggatcatcggctgtcccttgccgcattcccggtaatagagcttcatgtcgttcctccgtattttcgttgtccgcagtgattcttatatgattgtatttaatatgattgtgtttaataagtttatcattataaagaattgcctattctgatattttatcacaattattccttttattgcaggtgttatttccatttttccaatactcttccaccaaatcttcgatcagcataagccccaccggaccgagaataaatcccagaaatccgaataactgaaggcccacgtacatggacatcaatgtttccagaggtgacagccccattttttttcccatcagctttgcttcgacaaattctctcataaaatagcaaaccagataaaggcccagaagcatcaccccctggtaccatttttgctgcagcatcagaaaaatcccccagggaatcaggaccgtcccggttccgaagattggcagcgcatccagaaggccgattccgatgccggcaataatataataaggattcccaatcgctatcaatgtcaggatacagagacaggtggtcaagaacagaatcaccgcctgtgttctcagccatgcatttcctgtcagggccagtctttttcccaacagcgaaaactcccttctgaaaatggaattgtatcttctctccctcagttcatccatctcctgcagggaaagtattgatgcgataaacaggattaccgtaataattgctacttttataaaaaatccaaagacagatacggaattgactaccagattgggcatcgtcgcatttttaaatgccctggccgttcccaggagaacgtcctgaaccattttcacaagtacgccttcctgcaggcggcagaaggtttcgacggaatgacacatccccgtcagccattcatcgaaattctgcacccagacgggaacagcgttgacgagttggttcgcctccataaacagcctccgtccgccgtagaaaaaaccggccccgagcagagccagaattagaatcatttcaatgccgcctatcacgccaatcggaaccgcatatgtctttcctcttcttttcacgcgcagcttccgttccagaaaattggcggaagggcgcagaatcagggcaatcagatatgatatcagaaatgggagaaaaagaggcagaatgaatttaaagctgagatagacagcggccgtaacgcctgctgtcaacagcgcttttctctgcttttccgtaaatccggtcatcacctcacctgctttccctgccaaatctgtatttgacctcaatgtaaatggatttaataaacgcaggaacatcctccgtatctcaccatacatcgatattcctgcgtctcttttgtaagcttctcttcagtttctttaaggagcttacccatggtccagcccatttatgatttgtacttcttttgtacagacagtattataagcagatcaaataaaaatattcagtgtttttattatccaattatatgaaaaccgacttccctctcatcaatcggcatttcttctgtttccatatccgagatatggataaaatggccttcctccatctgtctgagcatgagatttatggattttaaatcaccctggacttccatctccactctctcatcccataaatttctaacccatcccgtcaatccaaggctcctcgccgcatacatggcccgatagcggaaaccgacgccctgaactgttccgctgaagtaaatatgtcttctggttttcatctcaatcaccaaacctctcaaatatcctgcccctcggtttaattgcaaattccatattcttgcctgtggatggatgaacgaaggataactttacagcagccagcgccagctccctttcacctctgcgcccgcggctgctctgaacctttgcagcatgatcgcttccctgcttcgccccggtatgccgatcggcatgcgttctttcaccggccggcagcgttcctccccattcaggattatatttcccgtctccccagagtggatttccatgggctgcaaactgcacgcggatttgatggtgcctgccggacagcagttctatctccacaagggaaatctctctttcttcctctgtcttcacatccagcgcccggtagacaagttctgcccgcctgctgtccggcgtgtctttatccacaacaaatgagaagttgtttctgccatctttcaacagataatccacatagttacccacaatatccacaagttttccacagactaccgcattgtatattttcttcatccggccatcctgaacctgcttgctaagagaggctgccgccttctgattcttagcgtaaaccatgattccccgacaggcttgtccagtctgtggataactccgacatagggctccacaggccgtgtggacgattttgtggatggctttgtggacaacctggataactccgctcttttcaaatggttctttatttcactgaccatatccggctcaaatccacggctggcctgcgattccaggccggccggcttctccgctaccagaatatcgtgatcctcatatattatttttaacatgtcaattcctctttcaccgttttcatcttcttttgtctccttttgtaacagttcagacagcatgaactgttacctcattttactatgaccggaccggttctacaagtgataacggaaatttgtaaccgttcagacaggattgaaaaatttattaaaactgtattgaatatttccaggaaaaagagtatagtatagttaaatataagatgtagttttaaaaactatgtaacagattaatataaacttcgttgctgcaggttcaccgaatctctgcaggcgttaaagaggaggcagaattatgaaaattaaaattaaagaccctggaagtgcattgactcactttattgccatgcttggagccggagctgccgctgtgccgctgctgttaaaggctgcccgcgaaccggaccatatccactttgcggcgctgctcatatttatcgtcagcatgatccttctatatgccgcgagtacgatttaccatacactggatatctccgatgaggtaaataaacgtttgaggaaactggatcatatgatgatctttatcctgatagcaggaacctatacaccggtgtgtctgatcgttcttggagaccggtccgggtactctctgctggcgctcgtctggggaattgcgattgccggtattattattaatgcactttggatcaactgtccgaaatggttttcttccctgatctacattgccatgggatgggtttgtgtccttgccatccgacagattatcctggctcttccgcgggccgcattcggctggctgctggccggcggcatcatatatacggtgggaggcgtgatatatgccttaaaactgcccatatttaattccagacataaatatttcggctcacatgagatttttcatctgtttgttatgggaggaagtttctgccactacattatgatgtatgcatttgtagcttaagcgggaatccccgccttttccgccgctttcctcctgcatgagctgtttggccgctcaaaacatagccagctgttcaaatactttattgacctctaattccccaaatccccagacattattcgggtagaatatatcctggttatgccttgccccgcgtgttaataaccggttgatatcatttcccgtaatcgacgtataatttcccctggcaaccgaccattctaaaatcatcgcgattgctccggcagcaaacgccgaagccgctccgctgccggtagtatttccataacggttttgaggcaaagcacaggggacccggtagcccggcgctgccaaatccggtttaatatgaccgtttctggtatatccccttccggatgcctgaatgatcttgcccacccgttgatcataggcagtgactgtcagcgaatgataactgttccccggggatgtaatcgtcgtatcaggatccgacttgagaaaatatgtattattcgtaagcatggagcctgcgggcagccacgcatggaatgaaaaagcctcgttttccaggttcctgattctgatggtccagatgccgggaagcatttttttgaaacggataagtatcagctgatctcctgtttcctgttcaaagattatattattaatccagattacacattcatgaaaaataaattgcagccttctgcagtcgagtatggaagggaatatctgctgcgttgattcatggttggggctaatatctcgatcgacagccgcgaataggaagaccatatttctaatgcaaattccgtgtctcccgctccggccagcagctcaacgtcatcttgaaaaggcgccgtaccggccgtaccgaaataatgcctccctgcaatcccctcatttccggccgatatagatactcccgtccacgggagctgggatagcgaatccagataactgctaagcgctccgtgaccgtcgtggccgccctggctgctccccagcgcgatacaaattacgacagggcgctgaagcgactgggcaaccgagtatacataactgacaccaagcataatatccgattccatataacagatcacatcattcggaacacaaaatatattctttatatttctctttgcttccttcaatttaactataaccaattcagcttttggcaccacgcctgaaaaattagctgtaatgctggggctgccggcaatgatgcttgcaacagaagttccgtggccgcctgaatcggaaatcggaacgacagactccggtgtttctgaggataaggctttatttatcgtttcagctttgtattcagtgccaaaggtaaaatctttcggaggacttccgctctgttcagtctgatcccaaattgaaacaagtctggtggaattgtcggggtttcgaaatgccggatgagtataatcgatgccggtatctataacgccgaccagcacgccctgccccgcagatccagataaggattatcctgcagggtttgtattcctgaggctctcatgctgatgggagaggtggcttcatacagacttggaaatatatgatatggcattgagccaagagcacagatattatcagttgcagggagatggattatagaatgccgttcgtttatataggtaacgctgtcagcgtcagtaatgcttccgtcaatatcataaagaggaagtaagacattgttcataatcaaatcaaaataattttcatctaatattttcataaaacctgtctaattgattatttgcttaaattatatgataataaacagcaaatattacttgataaccatttacctttcagtttaatcatttttatgtattttacatattatcatattcacaatataatccctttatcgaattcgacaaacataaaaggaatggataaaaggagaactatcaatcatgaaaaaacagacagacgcgaagacgctatggacattatttaaatcgatgtttgttttaagcgcatgcacctttggcggcggcttcgtcatagtgtcattgatgaaaaagaagtttgtggaagaattacagtggctggatgaaagcgagatgctggacatcaccgcaataacccagtcctcaccgggtcctctcccggtcaatgcttctgttattatcggatacagaatgggaggcatcctcggttcgctgacagccatcctcggtacaataattcccccgatgctgattatttccgttatctcattgttttacacagagttccgcactaacacatacatcgccatcgcccttcaggtgatgagagccggagttgcggcggttatcatggatgtagtctggaatctggcgtccaacgtatgtaaaacaaggagattcctgtacattggaatgatggttctgtcttttggcgccaccttcttcctgggcgtcagcgccatggttatcatactggtgtgtcttgggattggtcttgccgatttggctgctaccatgagaaaacaggtaggaaaaaggagtaactcatatgctgctgattagattatttttaagctttatccaggtaggacttttcagtgtgggcgggggctatgcggcaattccgctgattcaaaaccagattgtgaatattcacgggttaatgaccctggaagaatttaccgatttaataacaattgcagagatgactcccggacctatctccatcaattcctcaacctttgtcggcatgaggctctccggtcccttcggcgtaatcctctgtaccctgggctgtatcataccgtcctttatcatctgtctgacactggcgcacttttactataaataccgcagttttgaaggcgttcagaccgtactgggtgccctgcgtcccgcagtcgtggcgctgattgcatcggccggtctctccatcctgcttctcggacttttccagtccggaatccaggggatccgttttgagaatttccatgtgattgagggcattctcttcattgccgggctttacctgctcagaaaaaagaaagccggctccatctccgtaattcttggcagcggagtagtcggaaccgtactttatatggccaccggcctcgcggtctgagacttacccgatttgtaacagttcagacaacatgaaccattagcccgttttactaatatctcccatccgtgcaaatgtcgataaactgtttcatggattgggagatatatttattcttgtgataaatcagcttgatttttcttttcattcttgtattttccacattaagtacgcgcacttccccagcggcaatctctttttctatcaccattctggacagaatggctatcccctcaccgtttaataccgccttcttgatcgtctcggtattgctgcagctccacttgtttttcatctttatgtcatgctccagcaggaactgctcaaactgattgcgctccacactgcctgactctcttgagataagagcatgctttgtcagctccttcagcttaatgcccggatggttgaaaagctcatgttccggtccgactacgagtacaagttcatcatcataaatatctttcttcaccagctcatcgctcctgacaattccctccacaacggcaatatcaagctcacttctctggatttttccctcgatggcagccgtattatctacaatgacacagacatccacatccggaacctcattctccaggctctttatcatcggaggcagcagccttgtcccgacagagacgctccctcccacccggatcacattaccggctgaggtatcatttataaatccctccattgtttcaaatgaatcaatgatatggcgggcatacggcagaagcttctttcctgtctcggtgatataaatccgctgggacaggcgttcaaacaattttatattataatagctttccagttccctgactgcctggctgacagacggctgtgaaatatgcagcctctctgccgcagccctcattttcccgcagtcggcaaccgccacgaagatctgtaagtgtctgattgtcatttgatgcctcctttgccgctacttctctataaaaagatccatgcttccggagcggaatccctccaaatccagcgtaatataggaaaaccccagcttcttcaaaacgctgcagatttcctccctcttttcaagggctgcggccatctgagccggatccagctccagacgcaccgtatcctgatgaagacgcaggcggacattcccctcaaatacagtcctaaggtacgcttcccctttttcgattcttcttaaaatttcataatccagctttgttccatagggcagacgcgtagccatacagggagtggacggcctggatgccaccgatatgccaaaggcggacgaaagctcctttacctcccgctttgtgatatggcacagggcaagaggactgataatccccaattctttcagtgccctgattccaggtcggtaaacgtgggtgtcgtcttcatttgtcccgtcaagtatgcaggtaatccccttttcccgggcaaaatcgagaagagccgtaaagaggtgttttttacagagatagcagcgttccggggattgtccctcattccctccatctcaagctcatccacctggattacaacatgttccgctcccagctctcgggcaaccttctttgccgtatccaaatcgcaggcaggatggagcattgtattgaatgtcaccgcatagacgggggttttatattttcttccgttgtcacaggcgattttaagaagcaggctgctgtccacaccgccggaaaaggcaatgcataccggccctttcccgtactcatccatcatctgattcagcttatctgtgttcccgttcctatcagtcatctgcatcttatctcctcctgtcatgctgctgccggggcggacagcagcatagttaccgtcccgccgcatcctctttcagggcatggtagacttcggtaaaaggaagcccctgttcccggcagatttttcttacgctctcgtattccggataattatattcttcgctcccggtccggcatgtctttacatcagcagttccatagcgcgactctatctgtcttatttcccgctccagcaccgtacgctccacaggccagcggcggatccctatcgtcgtcgtatgggcaaatacggccgcctccagcgccttctgcttatcttcggtacaaagaatcctcagcacataagcaggacggttttttttcatgtatgccggcgtataccacacgtcttttgctccctcttccatcagacattccatgacaaagccaagggcctcccctgtacagtcatccatgtttgtctccagaatccagagtttttcctcattatagctctgtttctgcctgtcctccgtctttcggatcagcattgcccttaaaatattggcatttttaaaatccttgttgccggctcccacgcctattttttcaatgatataatgttccggaaggacgtccttcgtccgaagggctgccgcaattgcagctccggtaggcgtcaccatctccccttcattatcggtcagtttcagttccagtccatgggaagcggcaatattggccgtagcaggtacgggtaccggcatcaccccatgctggcagcggacatagccccttccttctgccagagacgataccactacatccgtaattcccaaatcatacatacaaacggctacactgattatatctacaatggaatcgacagcccctacttcatggaaatgcacctcttccaccggaattccgtgggctttcgattctgcttccgcaacaatccggaacatctttctggccagctccttcaccggttcttcggaatgcatgcggtctatgatttcaaaaatatcctggatattcctgtggatatgggggtggctgtgagtgtggtcatgattgtgatcgtggtcgtgtttgtggtcgtgatcatggtcgtgtttgtgatcgtggtcatggccgtgtttgtgatcgtggtcatggtcgtgatcatgtttgtgatcgtggtcatggtcgtggccgtgattgtgatcatgatcatggtcatggccgtgcccatgctcttcttcctccaaatgtacatcaaaatcgtaggcatcaataccgcatttcagttttctcccaaaatggagatggtaccctcccacgccaagactcttaagcgtttcttccagaacatttctgctggccccaaatcgagaagcgcgcccaccgtcatatcaccgctgataccggaatagcattccagatacagcagtttttcttctttttcctgatttgtaaattggctcatcttaatatcctttctcctaagtttagactgtgtaacagttcctctcggccagtctgttgatctgcgcggcaaggtaaccggccccatagccgttatcaatatttaccgttgaaatcccgttggcacaggaattaatcattgtaagcagcgccgagagtccgtgaaaactcgcaccgtagccgaccgacgtgggaactgcgataacaggattctccaccagcccggctacgacagtcccaagggcgccttccatgcctgcaattgtgatgacacagtttgccctcgtaatctgttcccttttagatagtatcctgtggattccggcaacccctacatcgtaaatccgatccacgtaacagccgaaaaattccgcggtctgggctgcttcctccgccacgggaatatccgcggttcccctgtacagacagcgacacagccctttctttcttttccctccggctctgcctttaatatacgcgaaaccgggtcatagatgataccgggaattctttcctttaccagcaagtactgctgctctgtcgccctcgttcccatcacctcaccattttcacggtacagcgtgtcaaatatatccgccagatactgatcgggttttccctgacagtacacggtttcaggaaaaccggagcgcagctttctgtgcagatcgagttttgcatatcccagatcttcgtatggcaggtttttaagcatttccccggcttcctcaggtgaaagcgtacccatactcacctgctccagtattttttttacgtccatctgttcctcctgttcaccatttccactttacactaatttacacgcagcatcatggctgaactgttacagcagtcggctaatcaaaatcgctgcgcgatgagccgactgcctgctgccactgccttttcgcacggtcagcgcagcaaatgcgcagacctgtctgaactgttacgtactgttacgtactcatcgtatccagtctgatttttcttgtacagactctgtctgtgaggctctctgaatgactcactatcagcattccgattcctctcttccctgtttcttccaccaggacatgccaaattatactctgcgtcaccatatccagcattgttgtgatttcatcggccagaagaattttagtcccctctcccagcgcccttgcgatacagaaacgctgaagttctccgcctgagagttccgaaggaaaacgatccatccacgcctttctgattcccagtttttccagaagctccggatttatttgtccgccttccctcaaaacacgggccatcttccaacgcggattcaccgactgctccgggtgctgccagatcatctgcaccggcagccttcctttatattcctcaagcggtttgccgtccagcattacctgtccggaatccggtttttcatatccggaaaggatcttgcagaatgtggttttgccaaatccgctgggagccgtgatcccaaccctctccccgctcccgatttccaatgaaagcctgttcaaaatctgccggctcccggtatcgtacctgaatgaaatatcctttgctttaagcttcaccgcgtcacctccggctcctggttctttatcaggctcttttcgtcatataccgcgaaatcatgctgcggcatagcatgatacagagccttagtatatgcatgctgaaggccgttcggtctgccgaaatctccgggtttgatttcttcgattatctctccctcatagaataccataatccggtcggctgtttccagcgccaattccaaatcatgagtgataagcagcacagacgcgccttcttctgctatctctttaaaatgacccattacccgtctggccgtagcaagctccagtcccggcgtcggctcatccgcaataaccagtttcggctcttccatcagcgccgatatgatcaggatacgccttgccattcctcccgacagttcgaagggatatagctcttccgtctctgctccaaggccgaaccgggccagcaggtgcctgcaccgttcgatggatgcgctgtcttttcttccctttcttatctgttctcccaccttcatcaggggatccagataggacactccctgcgggacaagggcaatttcttttccgcgcagcttattcagccgttcctgcgtgagcagctctccccggtagagaatctcgcccgaaacccggcagttgtaaggcatgattccgagaacagcatgagccaggagacttttaccggaaccgcttgctcccacgacagcagccatctcgccctgattgagggtgaagcaaagcttcttaacaggattcagttccctgcgccgaagtcctctgtcatactgggtaaatgaaatacccagactgcgtacttccagtaccgttttgtccggcataccaattcctccttgcagtatctatcgttattttcccagcccttctattcatgcgcgctttgcggatccaacaggctgcttacgctctgccccaggccctgaaacaccagaaccgttgccaccagcgcggctcccgggaagacggccagccaccattttcctgttataagatacttcatactttccgacaggataattccgatggcgggttcctccggcggaagaccgaatcccagaaaggtgatggatgcctcgtgcaaaatggcatgcggaaacataagaacaagaccggtcagaaaccggggtaccagatgaggcagcatatgctccaccgcaatcctccattttcccattccaagcttctctgaaattttaacatactggctggccttcagctgaagaacctcggccctgataagtcttgccagggaaggccagtgagtcagtgctataccggccgccactccggtaaaacctttaccaaaggcaaaggatatcaatatcagcagcagcatatggggaatccccatcatcatatcaatcaggcccgatacggccatatctgcggcctttccaagtacggcagcagcagtgcccaggattacggctatcacggcgctggatgcagccgtcactatccccaggcggatgctcatggacagtccggccgccgtccgcttcagcatgtcgcgcccgagccagtccgtgccaaaaagataagcagttcccggccgcagattcttccggccaaaatctgtaaccagagcgtcattttcccagatatgcccgagaactgcaaccaggataagtacggccaggaaaacagtcacggcagccagtgtcccggcccgcctgctgcggacgggtagatgaatccctccaaagattcgggttatcataaggtttcccccttccgcaccatttttttcctgtcacgtttcaatctcggatcaacggtatagtaaagtaagtccgcagtaaaattgccgagaaaaacgacagcggcgctaatcagggtaattcccagcaaaagcggaacatcgctgccgagtccggccgtaattgccgcctgccccagaccgggataggaaaaaacctgctccaccagaacggagccgccgaatatctcactgatggacgcaaactgcagcgtgataaccggcaggagtatattcttaaggccatgcctcccgactatctgccactgcgtttctcctctggccctggcatagaaaacataatcgctctcaagaacttctatcattttgcttctggtatgcatggcgatattggaaacaccggtcagccccagcgtcaaggccggcagtacggcgtgaatcagcctgtccccgaatgtcacctccgacgccgcaacccccaccggaacactgaacccaatagggaaaatcggaaaccggatggcaaaaaccagcaggaggacaagagccagccagaatgccggcgttcctgcaatcaccatgcaatatgcagttaccgccttatcctgccatttccctcttttcactccggccagtactcccagcgccacaccgccaattcctgaaaatatccaagcggatatcatcagccaggcagaatttgcaaatttttcgcctatcacatcaagaaccggcctccggtaaagaagggagatgccgaagtccccccggcagatgccggaaaaccagcgaatgaatctctcgccggccggcaccgtaactccccagtattcttttaacctttcaatctgttcctcagacatggaccccaatgctgcctgtcccacgttgcttttcagcggatccaccggcgagatggaaatgagaaagaaagcggccgcactgacagccagcagaagtattgccatccttatcagatttttaattataaatatgccatgccgcttcgtcacttgtatcttccttcctttattcccagctccactgatccacgttgttaacaatagaccagccgtgtccatgtgggtgaagcttctgttccgctaccttcagcccatctctgacccagtagagatgatcgatattaaccagccagatccaggggatatctccctcctgcgtgatccctgtacttccatcccactgtgcctctttccataattcccaggattcctccaggttatcactggccagggcctcatccatatactgatccaccgtcttattcgcatacggcgagtaggccgcaagtccggtatcctccatggaatggtaaatattgtaaagttccatcggggtatgcgctccccatccccataaaagaggctgggactgtgcttcgtcatatgccgtatcccatccggctccccttgttgatgcattgatgccgatttccttcaactggttcgccgtatcggctgccagcgcctgtcttacggaatcgtccgccggatacagaaattcaagctctgccttcaccccgtccttttcccggattccgtccgctcccacgatccagcctgcctcatcgagcagccttgcagcttcatcccggtcacaggtaatttcggcatcgctgttataccatggcatcttgtcgcagacactgaaggccggacttccataaccgtttaaaacattctgtatcatctcatcacggtcgatcgcaagattaatagctctgcgcaccaggacatcggaagtgaaatcattccccaccttgagtccgtccttctccattaccggaacagccggaagattaaatcctctgttatctacggtttcacaggccagaagtgaatacccggcagtctcctgatccgcgtaggaagcagccgtataagccagatccacctgtcccgctttgactgcggcaaatgcggcatcctcgtccataaaaagtatcgttacccgtttcatcttcggctgttcaccgtagtaaccggggtttgcctccagaatcacctgctgccccctgtcccactgtttcagcatataccgtccggagccgaccggatggctgccgtaatccgaatcataggcatgttccggcacaattcctgtaatagccatcgtatatggccatatcgaataggggcgcgccatatggaagaccaccgtattgccgtccaacgcctccgcgctttcaagcattgtaaaatcattgaccgagctggtctccctcagcgtattatatgtaaatgcgacatcctccgctgtcagcggttccccgtccgtaaatttgacatcatcgcggatcgtcaccgtccatgtcaatccatcctccgaggatttcatatcggtagccaaatcataaccaatccccaaatccggcgttgtcaccgtaagagtactctgaatcagtggctcatggacatgttcgccggccccccagccataggcagggtcaaatcccgcttccggttcggaatttgttgtcataacaaccaccaccgaatctttttgctgctgtgtgttctctgcctgctcctgcactgccgtcccattggcctctgccgtaccgtccttaccgctgccggaaccggaacagcccgtcagggccagggccgccgctgccgccatggcaaataatgcacttgtttttgtttttttcattttaatacccctctctttgtcaattacacttcataaaattccgaaaaaaaaataccggaaaagctctgccccttggggacaaaaataccttcctggtataattaaagtcttaataaaaaaataaaattccgcttctgcggatagagacggcttgtgctgtcggatgaaactattatagtcccgcccggcagcgcagtcaatcccgttttcacgcttatttctcaaacgcttagatttaactgaggtgagaggacgcgtccggaacggaccatgtccggtgtggtgagggaggtggctgagtcttttgtccccgtggagaggttgtcgtgaggggagggaatccggccgctgattgtctctaaccttaaatgggggaggcccctgtcgcggccactacgtgttcccggcaggccgatatcaaatcttccggctccgccctgcgaaaacaaaaccacagtatctccttctccagccagcgatgccacttccccgggacgaaaaactcatagatccctccccgtccgctggcctgcggctgcgtcctcacctgcttaacttaaatgacccttcaatcagaccgtcgtctttcggacattactctccagaagacggttaaagcccagccactgtgtattatctcccgcctttttaagcagttccgtcatagtctccagtttcgcatccgtattgtcggcaaatgccagagccagagcctccatcagcgccggttttttaggggaaccatattccagttcgccatgatgcgcaagtatacagtgtttcagttcggaggccgttttttccgggaatcccgcaattgtccggattctctccccgaccatctccgttccaattatgatatgccccaggagctggccgtcgtccgtataatcattttccggaaatgcagacagctctttcgtctttccgacatcgtgaaagagagccgctgtaagtaagagatcccggttaatcatcggataggctgcggagtaataatcacacagcttcattacgcttaatgtatgctcaagcagccctcccacaaaaccatgatggacgctcttagccgccgaatggaagcagaacctttttacaaactccttgtcgtccgtgaaataactttcagccaattgtttcagccatggattcttcatggactggatcagtgcagtgagttccctgtacatctctttaatatctttggagctgaccggaagatagtcgctttctatgtattcgccctcgtccgccttgcggatccgtttcacattgagctggttggaaccctgaaataccgtcacatctccgtctatatatacataattcatcacatcaaagttaccgattcccggcgaacccaaatcccaaatctttgagtcgatagtacccgtcctgtcctggagggtcatcgacacgtactctttcccattctttgtcaataatatctgttttgttttgcaaagataaacgtctgaaacacgcataccctcatggaactgatcaatatatttcatactcttccttcctctctgcggcaatggaaaaactccgtaaaatcgtaacagataagacagaatgaactgttatgtaaaatctgctatttcgtcaacagagagtctgacaagtcagactctcgtgttttaccatcacattttctcttcttaattcttatattttgtcttcattcttctgattcggctgactttttaagcccgggccatcgtcaggctgctctacctggcccttatctccacttcaaatggatccagctccttatagccgtccggaccttttctcataatcttcacagttaccctggaaccgcagcgggcattttcaatctgcatctgaagctccttgaatgtggtgatctctttttctccgaataatgtgatgatgtctccgttctggattcccgcgtcataagccggtccgcccgatacggcctccaccacatagactccctggggaatcccgctctctgccatcgcttcgttgacttcctgtcccctgacgccgaaataaggcacctgatggccgttcgtcatcttttcaatcacgggcttataatcggaaatgctcacggacgcggtgatatcacggttttcctcatttttataatcgtcagaggtccatccgataatctctccggccgtatttaaaagaaacgtacccatagtggagttgctgcatatatctgcatatataatccttgtgatgccgtccgtcatctgaacgttccttgcaatgtaggagaccgttccgtatgtcatggagtgtacctgtcccgacggaccgccgactccgattacgatatctcccgtcttcacggaataggagttgccgagagtgagtatctttatctcttttctcagttcctcgcccagctcctggcattttacggaaataacagccatgttaagcacttcatcaatctgcttcgtctgtcccgtaacctttgtaccgtctgaaaatgtcactgaaattgaatcggcctgcctcactgcatccgcacaggtaaatatcagatactctcccggcgtctttgcaattaccgcaccggcataatcaccggtactctcaaccgggttaccgaacagatctgtctgctgctttcctgaactgatctttacaatccctttatccgcctgcaccgccacatcgcgcagagaactgtaaaatgagttcaggttatccggtgtaaagctgtagcgcgtaagcgcatcttcaatcgccttctgaagttcctcttcctcaacatgtatcggaagcgtctcctcctgagtcgggccgacggcggctgtctccggatcatccttggcaaaaacgatggaggtgctttcctccgtctcctctcttcccaggtaccgatccgccaaaggcttggccagcacaaaactgacagccgaaatcacgccaaacaacacggcaaggcacatgagaatcagcacacgctttgcaatctgtcttttggacaacggctgttttacaatcttttccctcataaattcccggttaccgggatttctcttctcaggtccttccgtatccggcatacttttttctcctttgaacaacataccactattatacttttgttccggtagttatgcaagaaatttctgtacagctggttttatttggttatgcttgtcttactgttcatagcagaatggagatttaactgatgttgggaggacgcgtccggagcggaccatgtccggtgcggtgagggggctgtctgagtcttctgtccctgtgggaggttggtcttggagggggaatccggccggcggagtcttccaccgggacgaaagactcatatacacactccccctcggcttggctgtggaaacgtaatgttcaaaaagactgcataccggtatttcccggccatgcagttttaccaatgtttctattctattcaatcttgccgatactcggaaaatagcggaaaagaaccttcgcaattatcttctttttcggcacgtaggggtcgtcccaggccctggcgtctctggaataattccggttatcgcccatcatcaggtaacagccctccggaacttcaaagcggtcatccttccatcgcatctcttcatgcagatacggttcgtcaagcggttccggagaaccgttaatatagattctgccgccggatatctccaccgtctcacccggcagcccgattacccgcttcaccagtctggtttcctttccggacgtatcaatcttgtgattgaagatgacgatgtcgcctctctgcggatcccctgttatataggccagtctggaaccgatgatcctgtcccccgtcataatggtcgtctccatcgaattgctgggcacccggctgttggcaataataaaggtattcagaaataacgcaatgccggctgccgtcagcaggataaaaaaccactcacgaatttcttttttaaagtcgaaagttttctctttcttctgttccttgttctccattgatgtcttatcctttctttttgtggaaccggcgcatttttcgtcttctgccgttttgcctctctgtcagcgccggaatgcatttttatataccagcaggctccagcgccatatcgtcgaagcactgtacaccgtctcacataaatcaaaagacgttttaactgcctgatgtccataaaatccacccaccccttacggctccgcttatacggccgtattattcattattctactatgcggcaatatctgagtcaaggtgaatgcaaactgcctgcgtaatcctaatcggttcctttccccatattttgacatgtttttcccatatcttaagaaaaaggacggaattaaggggtggcacaaaagaaaccgtatatgatataatgtccgcagagcgggcattatatcatatacggtttctgcgtccaccgcagaaagccgggcgctgtattccgcctgagactcatgtgaacagccctcctgtgccggctgccgcacgcaataattcagcaaataccgaaacttatttaaataaacagcatttttttacaaggtgaatgaaagatgaatcaaaaagcacttaatactttagaatataataagataatcgcacagttggaggaatatgcttccacccagattggtaaaacattgtgccgtgaactggttccatcctgcagcctggaggaaatccgcaggaatcagacggaaacaaccgatgccgccacgcgtgtccgaatgaagggcagtctttccttcggaggggttaaggatgtgcgcggctccttaaagcgtctggagattggaagctccctgaatattatagagcttctcgccgtcagctctctgctgaccgtcacggccagagccaaagcatatggccgccgggaagaatcggagctgccggacgattctctggatgagatgttccgcaccctggaaccgctcaccccggtcaatacggaaatcaaacgctgcatcatatcagaggatgatgtcagcgacgacgccagcccgggactttccaaagtccgcaaatccatgaagatcatcgccggccgcgtacacacccagctcaattcagtactcaattccagcagagcctatctgcaggaggctgtaattacgatgcgggacgggcgctactgtctgccggttaagtcggagtataaaaatcaggtgcccggcatggtacacgaccagtcctccaccggatccacgattttcatcgaaccgatggctgtcgtgaagctgaacaatgagcttcgtgaactggaaatccaggaaaaacgcgaaattgaatttgtccttactgcgctgagcggcgaactagttccttataccgacacaattgcccttaacctggagcttctggccaagctggattttatttttgccaaagctgccctgtcccgccattttaactgtacggagcctaaattcaacaaccggcggtacatcaatatcaaggacggacgccatcctctgctggatccgaagcaggtcgtaccaatcaacatttacctgggggatcagtttgatctcctgattgtaaccggtcccaataccggcggtaaaaccgtctctttaaaaacagtgggcctatttaccctgatggggcaggcaggcctccatataccggcgtttgacggatctgagctggctgtctttgaagaggtgtttgccgacatcggagacgagcagagtattgagcagagcctcagtaccttctccgcccacatgaccaacattgtttccatcctggagcaggcggacagcaattccctctgtctctttgatgagctgggcgccggaaccgatccgaccgagggcgctgcgctggcaatcgccgtactcagcttcctccataatatgagctgccggaccatggccaccacccactacagcgaactgaaagtctatgcgctgaccaccccgggcgtggagaacgcctgctgtgaattcagcctggaaacactgcgtccaacttaccggcttttaatcggaatccccggaaagagcaacgccttcgccatctcaaagaagctggggcttcccgactacattattgaagatgcgaaaaagcatattgaacaggaagacgaatctttcgaagatctgctggcagacctggaagataaccgcgtgacgattgaaaaagagagggccgaaatagcctcctataaagaacaggtcgccattttaaaaaggcgccttgaacagaaggaggaacgtttctccgagcaaaaagataagatgcttgaaaaagcccgtgaagaagcgcagaggattcttcaggatgccaaagatacagcggatcagaccatccgcagcattaaccggctggcaaaagaatccggcgtgaataaagaacttgaagcggaacgaagcaagctaagaaacaaattgagtgacgttgataaaaaactggccgtgaaaccggctgttccaaaaaaagccgtatcaccgaaatcactgaggcttggcgatacggtacgggtcctttccatgaacctgaaaggcacggtaagctcacttccgaacgcaaaaggtgatctttacgtacagatgggtattctccgttccctggtgaatataaaggatctggagctggtggacgaaaaaaccataagcggtcccgggatcccgcagtcaggcccccgcagttccggcaataaaaacggaagcggaagcagcaaaattaaaatgtcaaaatccttctccatctcgccggaaatcaatctgattggcatgacagttgacgaggccgtaccggctctcgacaaatatctggacgatgcctatctcgcccatctgcctcaggtaagagttgtccacgggcggggaaccggcgcgctgaaagccggagtccacaggcatctgaagagactgaactatgtaaaggatttccgtctgggcgaatttggtgaaggagacaccggtgtcacaatcgttacatttaaatagaaatgtgccgctgtccgcagaaccgcgtatttaaccggtgctgtggactgtggctaatatggtaaacagggggaataaagatggcagagaaacagcgtatcctcatcgtcgatgacgattacaatattgcggaactgatttcactttatcttacaaaagaatgttttgaaacgagaattgttggcgatggggaagaagcgctgaagcttttccctgtctttgaacctaatcttgtgcttctagatctgatgctgcctggcattgacggctaccaggtctgccgggagctgcgggcctcctcccaggttccaatcatcatgctctccgccaaaggagaaatcttcgacaaggtgctgggactggagctgggtgcggacgactatatgattaagcccttcgactccaaagaactggttgccagggttaaagccgtactccgccgctaccaggctgctccgccgtccgcggccccaaagccaacggatcagcacggcgactttgtggaatacccggatctgatcgtaaaccttaccaactactccgtcatttacaacgggcactccattgaaatgccgccgaaagagctggagcttttatatttcctcgcctcctcccccaatcaggtatttacaagggagcagctcctggatcatatctggggttatgaatatatcggtgacaccagaactgtagacgtacatatcaagcgtctccgtgaaaaaattaaagatcacgataaatgggcgctgactacggtatggggaatcgggtataagtttgaagtgaagaggtgagttgggtgaagttggaggacgcgtaccggaagggagcagagccggtgccataaaattggttggctgagtctttagtccccggtttacaggttgccgcggaggggaatccgccccaggttttcgccggggactgaagactcaggcgaagtcctccctgtttatattacacacttcttaagggccagtccccgaaattgcgcatattcctccgcaagctcctttaaattattcttttccactgtctctaacgcttcgaataatgtcatctctgtttccagcttatctccaagcgtctttgttctccagattccggctatccggcctgccttcaggattaccccgggatttccgaccgtcttccagacggctttctgcagtgtccggtcttccaggaggacatctctgtcctttatatcgagatagggatcgtgggctccgagaagaagcagcctttctccgtcagcttgggagtgcgccagcgcctccatatcattcgacagcatatagcacgttttcttccctgtctgaaccggttccatctcgtctttagccccgctccagagccgccgggcctgctgcccggaacagcccagccaccccatgaaggaatccctgccggacgggccgtagcaatgcagaaacgttcgcacgagttccctttcgcactctttcctggcttccggttcctctgtaaacgccagttcttccggtctgcggcccgtccagttttgaaaagaagtaaaggtcggggttatcccctgccttctgccaaacacaatgagggatgaaaaggaacagggacggagcaggaaagagacggcggcgcctcccaccgtttgtctgtccgggtttccgtacatggacggcgctcgccaaagcgcccttttttcttccgttaagctgcattcaattatatcggccaatgtctggtcaagagtctccttactcctgaccgtatggctgttaagataaccggctgcctgctttgtccgcatcagcaaatcatcgaaagacatctgcatgtaatccagagcggctgtgataccacgcgtgtaaatccatggctgttctccctcctgggcaagcagcgccgtcaggaagacgccgcttcggtctgtcggaaaaacgagaggaacaccgcggacactccatgcctggagcagtatctttttctcgtacagagcatcgtgcaatatgggcagcgaacagccctccagccggttgaacatggccgtctcccaggccccgggcggggaattctgcacaccgcaggcgcctgccgcatcggccagtcccgataacggcagcttcttctccagatggtgggccttaaggcggtagctcctgatattttctgtctcaatcttcatcggttctcctcatcgttatttatcttttcatccggttatttatctttcctgcgcctgaacattcctttcttcttttcctgcccctcttcctgtatatctgttttattcctgttcgcctgtattttgaccgcccaccatacaataaccagcagggccaggcaaagtataatcacgggactgtaagatatcagcatgacaaacagatttgtaagcgcagtgccgacattctgcaaattttctgaaaagcctctccgaattcggctgcccaccgtctcctcctctgtcggcgtaagtaaaatcacttcctcgacatagagattgaccgtactgtaggatacctgattctccatcaggcgaagctgtgattcataggactctaactggtagcgtatctcagaaagcctggactccagtgtgataatcgcttccgtcgtatcggccttctcgagcagcgcccataagcgctcctgctccactaaaagcgtcttctttctgctttccacgtcggcatagctgagtgtgacatcctccacggactcctgcttattcgtcacattcccgttagcctccacctccgttataaaggcagacagatggtcggacgggatacgggccgtaatccgggcgcttttccggcttctttcgccgccatagcggatactgctgccggaaatatccgaattttcgatataaccgtcaagctccgtcacctttttgtcaatgctctccatcagctcgtcaaactccatggtctccagattcatggaaacggttctgattaatttccgcttcgtatttaccggctgtattcccccggaagaggaagtcataccggaaggctccgctgtttcagacttatagtccgtactccccggcgccataccgctttcctcattataaatcatgtcctcccgcgccataccggcgctggtttcggctgctgccgcaggggaggacgcgcctttaccgcacgccgataatagcagacagacggccagcagcaacagcagtcccctgttctttctggtgtttccgatttctttcataatatctcctcctgttaaagctcttacacagccgccaaaagccccggaaatataactcctcctctccccgtttcaaagttcactctttggtccatccgttattgggctgacaaaggctgccgcattctttatagatttcatatttcttttccatatttattaccttttccgctatctatttactgaaattttatcatgtaaagcatttcttttcaatgaatttaataaaattgtcagaaataaacgttaatattaagctgcgatccgcagcacagccctgttaccgtttaccggcgcctgccaggtttgaatctttccggatctgccggacgacaaatgccagtgtgtatactgccataaacccggacacagccggtgcaattgaaccaatcagcagcagattatcgggacagcgcgtaaataccagccaaatgagcggcattctcagcgccagcgcgccaaagcagcagcttatcatcgtaaacacggtttttgcccttccgttcatataaccattcaggcagaatacaaatgaaacagccaggtaatcatagctgcaggcccggaagaaaggaattccggccctgattatatcaggatccctgttaaaaattcctatcatcgtctggggtgaaatctgagcccataagaagaagacggaggaggcgagaatagcaaagccgattccggcagccagcgatttcttcgctctctccagtttccccgcgccgtaattctgcgccgtgattaccgccagggcgctggctatggaggtggccggtagcattgcaaacacatcgtatttactggcaatacccaccgccgccgcagtgctgacgccaagccggtttataaccgacgtcagatacaaaaatgacagccggaccatgctttcctgaaatgaaatgggaatcccgacacaggccagttcctttaatctgcctttatctatccgcatattactgagcgtgaaggtaaaaaggaacttctttttgttcagatagataatggaaactatcatactgacggcctgtgacagaaccgtggccaaagctgttcccgccactcccatatgtaaatatttgacaaacacaaaatccccgataatattcagaatacaggacagagccacaaagtacatcggccgcctggaatccccgtatccccggagaatcgcgctgatggcattataaccgcagataaaaaagatgccgtaaaagcagattgtaacatattgttttgccagtgcggccgattcggccggagtctgtaaaagagccagtatcggatcggtaaaaatcagcatcactaacgtaagcgcgactgccacggcagcaaatacggacagagtggttccgattgtccttcttgtctgttcttcatcccgcatgcccgtatattttcctaccaggattgtgcctcccatcgttaggccggacaccagatttgtaataatctgggtcacctgagttccggtggatacggccgccacacttttgggggaacagtaccatcccaccaccatcagatccacagccccatacaaagcctggaacaggtttgcaatcagaaatggaacggaaaaggccagcagggcatggaatacattgccttccgtcaaaagatgatcctgtttcataaataaagtactcctttcatttaaaaacaaaataaaccctccagcaactggagggtcaatactttttcataactttactactcgttcataacctgttccgttataatccgatataccttttccacttccggcacatcctcaagatagaataccggctcccgtttttctctccggtaaaacggcattctgatccggcagtacaccagacttatctcaaccggttccctgccgaatgtaatcgttcccgttccgtcacggtttacagaccggttcaccaccgggattttcttcagcagaatatagtcggcatttttaccctgacgcctgagaatccttttcgtggtcacaatatagtccgtattgcgtttcattatctgtgcatggaaaaaacggcctatcagcaaatacaggccaaacacgaaaaacacggcgccgaatacggcgaaaactatatcctcctcagagaactgcgtgacaaacagcaatgatatggcacaccacgcaaggctgaacggtaccataaccgcatcatatccatgaaaaagcttccccggtacaggttttcctatccatatcacattttcatcctcttttaactgtctgttaagccagccccgattcaggccgtctgcaaagtccttctcctgacttctcattgataccccctaacgctttcccaccggaatctgaatctccgtcacatactgccccacgtcatcggtaaaaccggcatctatcagcgtcacctcaaccgaatcccccaggcagtcatatcccttttcttccatataagtgagcagtcttttataatattcggctgcgtctttatgcatacccgagaacctcaccgccaaatacctcccttccggaaggaactgttcggcgccgcggcaggagtcaccatcctccaggaatacaaaaattccggaaaagttttgaaaccggcgtcccaaaagattggctttagaaatggcaacgcctaccttgcccaggaaaatagccggctctgtcagactgctcagctccagttcccggatcggatattccaaatcctcctccaattgaatttccttccgcagaaagacaatccggcgtttttcacagtgaatttcccgtatctccccggtcggagtacgaagagcatcctccagggcagccagcctccgttccagcttcctctcaatcctgaggagagcgtttatctttctccgggtctccagcttctgctcttccatcagaaactggaggctcctgacgtccctcttttcaaaaaacagggctatactctttaacggcatatcaagagcgcgcagatacttaatggaattcatccgctcaaactgtcttgtggaataataccggtatcccgaatccggatccgtcgtctccggacacaggataccgatttcatcataatagcgcagcgtgcggatattcactccaaacagctttgccatctctcctattgtaaaaagttccttcatctcctgcctccagcgttttatcgtctcttttaaatttaatggctggggagtaattgtcaatttgaattaattaagttgtgaattcttacagttttatttcaatattttaaatgttataatcaaatattgactttaattatattaaagattatactaaatattattaaagtatttaaattaaggagggaaacatctatggcaattgaaattataccggactggatggctaatctggatgatgaagatgtgacttttattaaaaagttcattctggcctccggttccctgaaggagatcgcctcccagtaccatgtgacctatcctacagtccggctgaggctggataagattattcagaaaatcctgatcagcgaggacaccgcggcagagccttatatcgctctgattaaacgcctggcgctcaatgagaagctcgattttgacacggcgaaacttttgatatccgaatataagaagttgaaaaaggaggaaacataatggctatcgcatcctatatgattattgtaatcctgctgttttacgggggcatcctctggctgcagttctttctgtccagaaagccgaaccgctggctggggcttatccttcccctgatctctttcctgttttccctccaggcccttctgggaattgccgcctactcgaccgtgcgcacctcagttaccacaattatggaaaacggaacctcctatacaacggaggatgtggtcgtccctcctgagaaaaaagacacaggacagcttatcgcaactgctgtctccgtatttattgaatacaatataccaactgtgattctgctcggaatctacgcaggctgccgcagcagaagaaagaaaaatatggaactggaaaaaatgaatattcaagacctggaataaccggacggcacgccattatatgcaaaagccgggcattgctgtccggctttaagtctataaaatcaatcctgtttattttgtatacgttaaatatttacactttcaaaagttctaaatcccacccaatccgtctgcattgatcaactgctttagtaatgccctgaaataagatgatatactcttccgttaactcatgagaattttcctgttctataaacgctctttctgcccgaagctgcagcttacttaagaaatcatttaaattttcaacctccaagcagatatctgatatttgtttttctatttttttctgttttattttcattagaaattttccttctagttgtatactcccgcttaattaaagtttgaaaagttaatacgcaataactcaccgctgtttttttaccatattaatcatgcgcatcaattccaaggcacttctaaaatgcaccgtaatcccttttgtaagttttcctctcacgcttccctgcaagctggcgttctgttgtcgcctgcggagtattcagccaactgcatatctgatctatttttaataccatatctccaataccataaaactgaatattttccttgaaattatgattgtaaatatcgccatataccccatgatccgacacaccgtagatacagagcagcacaataacagctctgtcagccttgtctgaatctttaaactgcagtgttcctaagctatcactcaatattcttacgccatcccttcattccacgcttacatgctctttacgagtcttcttttcattcttaaagtctctcttcaatcagcaatcttataatctcttcacttaactgtttctccagctgttctttacttgatacgatgatgatactctctcctattttctcatttttttgttcctctcccaaaaagaaaacttttgtgtgattgagagtcttggtaacggttttgacaaattcttcatatttctcttccccataatgatccgacaccaaaatcaaatccaatccacctggcacaaatttcattccatgaaagataacagacgaatctttcgtcagtgtaatccccaaattataattcgttttatcgataaaatcatataaaaaatttcggcaatcccataaaaccttatcatcatatgccaatacagctacgtttatcctcactccgcctactgccttaaactgcattctatttctccctaaatcgtccagcttccagttttccctcatttacatttaaaacagtcccacattttctggggaaatcgcataaatatgattggatatctttagaatatttccattttgactataaatggcccctgaaagaaaatccacaattcgctccttatctttttcttctgcctgctcaaaatataggatcactgcatctccgtctaaaaatctgtcgcatatctcctgaacatcatccatcgtctgcggcttataagttacaatatttaaaaggaaatcgccttccgtaacgcttccaaaaaagccgtcttcgtcttcccaattcccatcgttatcctcatagcgccacaggttaaaacaatccattatcttgttcaacatgattccagacaccgccttatgttcaaaccagccgtgaagatatagagtgattttggcttaaaaatcgtctcttccttctcaattgcaaacgaaaacatgtggtttgctcctacctccgtttatgtggattatattctgtcacttgccattcactacgtttttcagagtggatcccgctctaaatacaggagcttttctgccctttattttcatagcctctcccgtttggggattccgcgctattctgtccttccggtctgctacccgaaaaacaccaaatccaaccaactggacatttcctccggaagataattccgtatgtatcacattcatcaatccattcaaggctttttcgctctgtctcgttgtcagtccgctttttgccgacatgctgtcgactaattgtctcttattcattttataacatgctcctttctcacaaacctcacaatttttttcgtaaaatccaatcaatttccttttcaagataccgttcaattttctctttttttccatatgagaataccttcttctcgtacacttccggtacctcccatgttcccaaaaagaaaacctttgcacggcttctgcgccgttccaaccgatcaataaatgtccgatattgatactgactaaatggatccgctacgataataatatccggctttctgctaaaaatactgatactctgaagcagcgcctctttgctctttgtaaggaccacctctattttaaaatggttatgctccgcaaacttgtacagcatatccctgtaatcccataggatatcactcttcccagacaaaacggcaatataaacacagcctttgtttaaccatggaaacacatttcacccccgtattttttactataccatttccaaaaacaatcttgtttctctctcatttcctatttcttaaacaagcattggggatgctactaaagcagcacccccagctaaaatctcatacctgaatcagataatttctaatgttttttgccatcccagacaccattatgatctacaaagtgattgtctggcgtcatctcgttctgatacatggagccgtaaggtcttttattgtgattgtcataataccagtaaccgttttctttctggaaataggtctgttccgggaccaaagaagcttctgtgaagtagtagttctttcccgacagggaaacccaaccatctcgcattgctccagtcgtttcatccaggtaataccactttccatccattggctcatggtaccagcccttatggagaatacctagatttccgtctgatactgcgtgggtatgataccattttccattctggctcttaatccagccaaactccatgattccatttgcatcaaacttaaaccagttgaatcttccttcctcattttttgcatagggatttccaatgaacatccagccatttttcgccattacaccggaggaggttgtataggtccatttatgggtcgtttcatccaccagggtccatgttccccgaattgagcctgtagttacattcatatccggattcgcatagattctgtcattgctcgcattacttcctttggaaccggagcctccgccagaacttccaccggaatttccatttcctgaaccgtttggcttgcttggttttgacgattccggttttacagttaccggaaccctgactttgtcctcggaaccatctggatacgtaacaacaataatagcagtataatcctttgttttgtctacatcaccaggggtttcgtcacggtactccgtaccgtccggaagttcatccttattttttatagcatcttccggcttaaatgtttcccccttatctataacgataggatttggtttcggttcatatttattggcatctgtttcttccgcctcatcaggagttgcttttttgggacgtaccgtaaccggaacctttactttatctttggaaccatccgggtaggtcacaataatgatggccgtataattctttgatgtatcaacactatctggtgtcgcgtcactgtactccgtgtcttctggaagttcatccttgttcttaataccatcttccggttcaaacgtttctccctggtctataatgataggatttggcttcggtttatacttactggcatcatttttttctgcctcgctgtccgttgccttatccggttcactaggtgttgcctggccaggtttaccgggttctgctccatctttaagaacacgtatcggtactgttaattctttagtagaaccatccggatactcaatttctattttccctttgtattttccaggtctatccagattcactccatcctctccgtactccgtgagatctgttactatcgtgccttccggcagttcatcttccagattcgccacgttgtccgtcaaatcagccgattcaccgacataaataatttccggtacaacttcaggatcatatttctctgcgtcaggtttccttttctttatcgttactttaaccgccaccgtttcgctggaaccgtctggataaatcaccttaattgttcctgtatagtttccaggggtatccgagtcaatatcaccttttggcgttacatcttctaccacggtaccggcaggaagattatcgatattttttacattgtcagttaagtcataggtctgaccctcttcaatcacctcacgctttgtcttaggcttatacctttctgcatctgtcttatcaactactgtcacaggcacttcgataatttctttgctgccatccggataagtgacttccacttttccaatatgatctcccggtttagaagtatcaatcggattttctgttacatccttcacttttgttcctgttggcaattcatccaggttagtcacattgtccgtaagatcgaccgtgccgcccggctttactatttctttttccacctccggctcatacttatccgctgctgtttcataattcagcgtaacttccacttcatcaaagctgtcatccgcataggttacctttacttttactttctggtccctgcctgttgccggaatggttcccactacctctttggttttcaccttatcatcaggcgcggttgtcgttacctttcctatgatttcatctgccgtagcggtttctccgtatgccttatccagagttcctccggttacttcatatttttcagcatcattctgtgtaaactcaaaaggcgttcccatagctggattttcaccattcgggctgtatgccaccagaactaccttttttccttccggaaccgtatttgcaggaatatcgattgtgaaatcgccatttatcagaccggcgaaaggaatttttgcagtgccatattcttcctgtgtataactgtttgacgcctcatcatatccctgaagcttcaccactgcatcccccgcgtcctgatttgtgatatcgagcagctttgattcatctgaaggatccttttgaagcggcttcgggacagtacctgtaatcgttactgcctttgtaagatcaaatgaagtcgtattcttgaccggagcggataccaaatagtcctttgcatcatccggtttcgtcttatcctccatgaactcctttccgtcaggcacaccgtctccatccgtatctacctttttggcatctgtccctatctgccattcaacaaaatcaaacaggccgtcctgatccgtatcatttgtatctaaataagcatttgagtaagaattggtcaattgttttggcggcgctcctccatccggcttatggataaccgtttgatttgattcattcagataatctgcttccatccaatgttcaaacaatacacgggcattcttagcttctacataatcattcatctcctttgcaaattgggctaatgtgacgtcatcccgcaatttgtaagaaatcgtataatttctgctctggcccaatgtcccccaaaaaatatcgtttgtattagctcttgctgaactcaactgtgttgttgtgtcatttccaataatactcagttccggaacttcaccggtattgagcattccggtatcatcaattgttaccttgaatttttctctggcatcaggctttaccccttttacatctgagttgtaaatgtaaacttcgctcctgtcaatgtaccgtaataattctacgggcatcttttcttttacatatacaacccatccataatcagtctgtaggtaattctggtttggtttccatgaatgaattgattttatggacattgttcccgcatcaaagaccactttctgattcattgcacctctagtaaagtctgtatttttttcatttttcacatttgaattgtcctggagaataaatccattactaacgctttcttcggcaatcgcaccattacttttaatccataagctgttaaacgaaacctcttcatccgcaaggccaagactttccagcgtatgcccattcttcaatgtaatctttatgtcatgatttgttacaactccaatcgccccaacattcatatttcccacaacaggaatcatccaaagggctccatcattcattttctgcagatttgtgtcatccagtgtcacacggtcaatctgtttataaaactggtcatttgaaaaagttaaaataaattttcctgcaaatgggttggaggcatcttctccccagccctgacctaatttcgtccatttactatgtattaaatgaatcgttccatccccatctactttagaaaaaatagtagctgcatatcttaaatccgattcttcaattccatttgctgtaaaatgactgtttgtatccatactgcgttcactaatactaccattgccattccgatacgaaacagcagcataagacggcatttcaatagaagggaccatcactgcaatacttaaggcaaatgcacacgccttttgtcctgcccttttaatttttcgtcttttctgtttcaaactgctcttcatacttttaatttcctctttcttttaataaatataatttataatgatttataatgaacttttcttaccatccccttccttttcttgttttttccatagtctataacatcctgtagtgtatcccttccgaaaaagctttctaatgtcatttgcagctcttcataataaacatgcatgggacacgcctcatttcgtttacaaagtccatccggttccagacaacgatttattttcatcgtcttttcaaacaggaggattatatcaagcagcacaatttcttttgctctcttagccagtctgtatccgcccgtcacgccatgtgtactcgtaaccaatccagcgtcacgcaaaatacgcaaaactttttgtacaaatatcttgttaagccctactgcctcaccaatttctgttgaactggataatccctctttgccagcaaggtatagcatacatcgcaatgcatagtcagttgtcattgttaactgcatgtagaactccttcctacctccttccatctaaaatttcaatggaattacataccatacacaatgggtatgtaatctaacgaaacctgggatgttatatatttttttacaggtgcattataacgataattttaaaaaaaagattgtaaatttattaatatttatgtatgtttccatatttttttctttcatcaattgattattacaataaaaccatgataaactcgaaccacttcctaccatatgcttatatttggtaaccattttgaaaaaagaaccgtaaactattgtaaataatgcattactttcaaacaaaagataaacgtatcagggagttttttatgataaacaaattacttaaattaataaaatccatacatgtaatttcgcatctgcccatctatgtgttcaataaggattttcatctggaacatctttttgttgcagaccgggtccaggtgcttccttatgattttactcaatgctgttgttcagagccttcttcaaacttcctcttttcagggatactgaatgaggcatttatcacgtattcatcttctgataccattttgattattggtccttttacgacctctcatcttactaatgctatgatcagaaaccgggtccaggcctatacggaagactcaagcctgcagaagcttctttctcaatatttggagttattgccctatttttctcttggggatgtccgggattttttggttcatttgaattttttgtttaacggtaatccggaatgtccttattcagaagatctccatctacaggtcactaaaaataattttttactgagacaggaaaaactaaaagaacgtgattggagggcgttccagccagattactatacctatcggtatgaagaacagatccttgctctggttcaaaacggcaatacagaacaacttcgcgaaggcctggcagagttaagcaacagtgtgatcccagataatgccgaaactcctcttcgctctgaaaaaaactatacaattattattctcgaaaagttatcctcattagcccttcaagctggacaggatatttctgatgtctatcgtttaagaaatttctatattcgtttattggaggaaaaggaaaagttaattgatgttttgtatgttcgggactgtgcaattatccacttcacagaactaatgcatcattttagtaataaagatttttcctctttggttaagtccgtgatgcagcatattggtttaaatctttataccgttttaaaggtgagtgacataagtaaatctttctatgtttcagaagctacattaagttccaggtttaaaaaagaaactgggattagtgtcattgaatatattcataaacgcaagatctctgaagctaaactgatgcttcgcgccgggctttcacccagtgaagtagcaattaccttatgctactatgattacgcccatttttctcatacctttaaaaagataactggcgtcacaccaaaggcattccagttacatccgcaaaaactttatcctaactttttgccgtccgccggcccggaagccgaacatgactagcagagtactatttttaatgagacaacaaaagacgggcatatcaataagctgatagcccgtctgttatattgtcccggatccttgtgaaagattcttttaattcagcatatactattatcaaatactctgcaagaggtatatcatgacgggctgtccttttaactcagcttcagaaaacattgctgactttatctaccggtacggaagccggcagcaattttttggtaattcgaaagatattccctgtatggactttgtaagtactgatctccgtattatatatacccctattgataccgtaaatcccatatcattaagcaagttttcctattacagtattcctggtctgtatacgcttctaggcagtggcagcatggaagcttccggtatattagcgactcacacatcgcctgcccttagcaatcagggacgaggagttataatcggcatcatagacatccattccaatgcctaccctgacaggaacctcggttgctgccgcccacgttgctggtgctgtagctaacctttttagctggggaattgttgagggacataacatatcaatgagtgaagcctctattaaagcatttttaatacggggggcaaaacgaaatccagcgctatcgtatcccaacagagaatggggatacggggctctggatttatatgaaacatttttacggctgagggaagcaagataattcattctagcggatggagaattatctggaaaaaagtgtctggatttgtctttctatttgcactgaattgtatgacaacagccagccctccaccagacgacttttgaatgtggaaaaaagtcctctcgcatcgaggaaggagctggaaattaaagatttgagaaatgaaaaatttattttgtaagtgcccaccgcggaaaaagcgggctttgaaaactgattattgcaaccgattcaataaaggaacaaaagcaccggcggccagaggacgtgacggaagactccgtcaaccaattccaccactccatcctctggccataccggacctggtcctcacctattcatttgcttctatcgccataatctgatcaactcttctctgatgccttccaccttcaaactcagtatccagccacacctcggtaatcatcttggccagctcactgcccacaacgcgggcgccaaagcagagtacgttggcattattgtgcaatcgggacatttttgcagtatacggctcgctgcagacacaggcgcggatgccttttactttattggcagccagggaaattcccagtcccgtaccgcagatggcgattccgagatttgcctctcctgccgccacggcttttcctactttctcaccataaacagggtagtcacagctctcggtggagtttgttcccagatccagtacctcatatcccttttcttccaaaaattccttgataatttctttcagctccactgctgaatggtcatttccaattgcaattttcataatatactctcccttgcttcatatccgaagcttttctctttcttaaaggcagccataccgttccataaataaacggatgatacttttgccgtatgctattcttcattgtattaaagaacaagcagattgtcaacattgcggacaggattaccgcgctttcattcccatacctttttggtattgatagtgatatatttgagtatttgacatttaattttcacggctctataatgacatcaatgaagcaggcgcgccatgaaaatacatgcagctcggacaatgcaatttgcgttaaatatactgcatggccatcagaatcagagaagaaaaggggaaataaatggaaaatcaatctttaggatattatctcaatcaactcagtttaaagcgttcagaagacattcttgaaatcaatgaatccatcgaaagagattacatatttcaggccttggctcttgaactggacaaagaacagtatcctcccgttatccgcgcctttgcagatgggtatgaagatttccctattgtcggcaatatctttgcaagccggctgcgaattgcagagcttctggggaaggcggggagaaaaatgtcacctcaaactggctgaaaatagaaagaaaccccattcggcctgtcattgtcccgaacggaccggtacaagaagaatttataacggaaaatattgatattgattttttacccatgatgcagtattactgcactgatgcaggaaggtacatttcttcggcaatcgttgcggttaaggatcctgataacggtatccataatctcagttatcaccgcatgcagtttaagggaggcggaaagtttggtatcagtatgcatacgcggcagcatctcttctattattatgagaaggcccgtgaggccggtagagatctggaagtggccattatcgttgggtgccatcccgccgtatcccttggagccgtatcacgacccggcctcgacggagacgaatatgatatagccggttccatcctgggtgagccgctccgccttgtacagggacgcaccgtgtcggtcgattatccggcagaatcggaaattgtgatggaaggttatatatctacaaaggaacatgaaccggaaggcccctttggagaattcaccggattttcaacttcccggtcaacggaaaacattttttactgtaccggcctctccagacgccgtcatccgctctatgaggttataattcccggacgttccaaagaccatctttatctgggacatatgatttgcgagacccttgcccttgcccgaattcaggaaaaaatcccttgggtgaccgaccttacttaccctatatcaggcggcaatatgcatgcctatatccagatgaaaccggctcccgcaggaatggcgaaggtggctgtctctatgttgatgggactcgattatatcgtaaaaatggcggttgttgttgacacagatattgatatcaggcaggatgaacaggtcatgtgggctatagccacacgtgtgcggcatggacgcgataccttcatgattcctgaatcatttactatctcactggaccccgtatcggaaaacaatacggtaaccaaattcggcgtagatgctacaatgaccagcgaaatgcgcaaagaactcgtcgtctgccagcccagggaagaggatatagccagggccagggaaatccttcataactgaatgccgcagcactgccttcaccggccaagcacgattcctgatatagcacggttcccgttatacaggtcagagaacagataaggagagattctgtgaacatacgtcagttagaatactttatcgtaatggcagaaacacaacaaatcacggaagcggcacagcagctgtatattgcgcagccgcctcttagccgaagtctgcaaagactggaaaatgaactgggtgtagtcctgtttaccagaaccaaaaaagggattgagctgactgatacaggaaaagtcctctacgaaaaggggagacttttattgaaaaattacaaagatatgctcaatgtaattaaggaaaccgaagaaggggtatccggtacagtgcgaatcggaacagggtatcccacagttcctctgctggctggcaaaattctttccttacgtaaacactaccctgccgtggaatttaatatcacacaagaggatcccgataaattgctggatatgctgagaaaggggaatctggatattatgttttccccccagacggtggacgatccggaactggaatcaataccgcttgaaccggatcctctaatccttgtagtcaaccggcagctcgatcctgccccggaggaagacagtattcccattgaaaaactggagggcatccctttttgcatgcttcgaaatggggatttttatggatataatgaaattctgattaatgaatgccagaagcacggctttaccccacatattttctgtcaatgcaacagtgcctccacggccatgacattagttgcccagggactcgggttaagctatcagccgaagatggtcgttgataccatgaccagtcaaaatttgtatggaaaatgtatccaggattttgaaaacaccatgtttccggccattctgagaaaaaaggatgcttacatgagcggtgccctgaaagtcttcctttcgctgttcagacaggaatccgtattcccttcctctctccttattcctgacccaggaaaggaggacgtactgtgataaatcataccgaactaacggcagggaaaggtagatttaaagtaacactattccttcaggagacaggcggccacggactctgctgctttctcaccggcggtgagcggccccatgtgggcggtacggtactggcgtctctcagtgaaagagtgaacggagggggaatgacctgcaatctctggaatatccccttccgggccataaagattcttatttggcggaaaaactggcaaagactctctgtctggccacaaatcagcctgttgccatcacggcagggctgcatgtcgataatgcttcggaggaagatattcaattgctggtgagcaacggatgtgacaccgttgcacagtatctgcagctaatcggaaaagagaggtaagtatggaaaatcatattagaaaaaaccgaagaatcatcgtcggtatctctggtgcaagcggcgtgattcttggctatgagatgttaaaagcactgagagaacaggattccacggaaatacatctgatagtcacggagggcgccaaacgcagcctgtcccttgagtcgaaaatgactgtcgactccctcttctctctggccgacgcagtatatcacgaaactgaaatggaggcccctgttgcaagcggttccttccataccgacggaatgattgtcattccatgcagtatgaaaacactttccgccatcgcaaccggttatgacagcaatctccttgtcagggccgccggcgtatgcctgaaagaaaacagacgcattgttctggttcccagggagacacctctgtcccgtgttcacctgcgtaatatggaagcggccgcttcggacggttgtattatcattccgcctatgctgaccttctataataatgcaggtaccctgcagaaacagatggaacacatcatcggtaaaattcttccacacttcggcatgcaaagtcagcgtttcgtaccgtggacaggaaagccgaatataatgtgagagatgaactatacatctcatcagatagcggcacttaacatagcttaacatagaagcataagtgatcaaagaaggaaatgtccggcatctcagagtatatcgatgccggacatttccttttaacttttattattcaggatggatcagactgcggccgcctcaagatggccgtcaatcaggtctatctgtatcgtatctcctgcccggacaccgtccgacagaatcagtcttgccgccaaagtctccacattcttctgcagatatctcttaagcggccttgcgccgtatacgggatcgtaaccgttttccacgataaattctttcgcccgctctgtcagcgaaatagaaagctccttgtcggccagacgcttgttgacgtcctcaatcagcaggctgataatgccgccgatattatctctcgtaagaggtttaaacagaattatctcatccagacggttcaggaactccggacggaaatgggcgcgcagatcatgcataaccgctgattccgcatccggcctgatcagtccgttgttatcaattccgtccagcagatactgggaaccgatattggaggtcataatcaggattgtatttttaaagtctacggtctttcctgtggagtccgtgatacgtccgtcatccagcacctggagcagtacattaaatacatccggatgtgctttctccacctcatcaaacagaacaacgcagtatggttttctgcggaccgcctccgtaagctggcctccctcatcataccccacatatcctggcggcgctccgatcagacgagatacggaatgtttctccatgtactcactcatatcgatacgcaccatgttgttctcatcgtcaaacagactctctgccagcgctttggcaagctcggtcttaccaacaccggtcggtcccaggaacaggaaggaaccgattggttttgtcggatccttgattccggccttggaacggattaccgcttcggtcacctttgtcaccgcttcgtcctgtccaatgacccgtttgtggagaatttcatccatatggagcgtcttgcttctctcgctctccgtcaacttggccacaggaatgccggtccatttagaaataattcttgcaatctcttcatcggtaacgctctcatgcaccaggctcatatcctggctcttgacgcgcgcctcctcctcttccagctgcttcttaagctccggcagttttccgtactgaagttccgccgcccggttcaggtcgtaggcctgctgggctgcctggatctcgccgttaatatgctcaatctcctcgcgcagctttgataatttatccaccgaggatttctcattttcccactgtgctttctgggatgaaaaactgtctctcagttccgccagttctttctgaagatcctccagacggtctttgctgagccggtcggtttccttcttcagggccgcctcctcaatctcaagctgcatgatacgcctggacagctcatccatctccgccggcatggaatccatctccgtcttaatcatcgcacaggcctcatcgaccaggtcaatggctttatccggcaggaaacggtcggaaatgtagcggtcggaaagaacagccgcagatacaagggctgagtcggtaatcttaacgccatggtaaacctcgtagcgctccttcagacctctcaggatggaaatcgtatcctccaccgtaggctcatccacacgcaccggttggaaacggcgctccagagccgcatccttttcaatatattttctgtactcatccagggttgtcgcaccgatacagtgcagctcgcccctggccagcatcggctttaacatgttgcccgcatccatcgaaccttccgtctttccggctcctactatcgtgtgaagctcatcgatgaacaggataatctgtccgtcgctcttcttcacctcatccaggaccgctttcagacgttcctcgaactcgccccggtattttgctccggccatcagggcgcccatatccagggcgaacaatttcttatccttcagtccctccggaacatctcccctgacaatacgctgcgccagcccttcgacaactgccgtcttacctacgcctggttcaccgattaaaaccgggttattcttggtctttctggaaagaatcatgaccacattccgtatctcgctgtcacgcccgatcaccgggtccagcttctgatccctggcccgttccaccagatcgtagccgtatttattcagtgtatcgtaggtcgcttccgggttgtcgctgaccactctctgatttcctctgactgtggagagagcctgtaaaaaattctcctttgtaattccgtaaaggcggaataattccttcactgcccggttcggctgttttaacatcgacaggaagagatgctccacggacacatactcgtcccccatggctttcgcctcatcttccgcattcaccagcaccttgttggcgtcattggagaaataaacctggccgccggataccttcggtaattttccgatattctgtacgatctcatttacaaactgttcccctgatattcccatcttcgtaatcagcttcaagatcaggctgtcgtctatcgtcagcagactcaaaagcagatgctcctgatcaatctgctggtttccatattcataagccagtttctccgtattttgtaccgcttccaaagatttttgcgtaaatttattgatattcataattgctgcctcctctcgcaaaattatgattgttttcgttgttatagtagtaatataacagatattattagcactgtcaagaggagagtgctaatacaatgtgaaaaatttgaggatttaattaggcaggtgaggacgccgccggtacggccagcggacggggtggcggggtgtgtatgagtctttcgtcccggggaggattgtcgtgatatggggctgcggccgctgatagtctcacgcattaagtgcggagggcatccttgtcgaggccactcagcgcatccatatgcgtttgatatatgttggatatgggaaaagtagttgttagagtatgtttattggaaatttactataatttgatgttcataaaagattgagcggaattaagaccggaagaatatcaccggtgttaattccgctcaatttagcgtggtttaatatttaatcgaaaaattatcgtgctgtccataccgttatttatcggcattatgtagtggcagcgacaagatttcctctcccattgaggccggagacaatcagcgtccggaacgggccatgtccggtatgcgaaaacctccgcctgagccttccgtccccagtgaaaacctgaccggggaagtaggcggaatcaattgcggaggggacatgggagtccgccggtgcttagcgaggttcctcacgagcttagcactgctgcgcactccaaagagtgcaaacggtccccgcagcaattcattccggccggattcccccttacgacaacctacaatccggggacggaaggctcagccagcccccataccacaccgaacatggcccgttccgtacgcgtcccccattctcaactaaaatccaccacatcaatccatctcataaggaattccttttccagttcattattcttcgtaagctgtgccgccgccacaatagggagccactgttccacatactgtcttgccgtatcactcttcctgcagaaaattttaaggtataaatcggcttttttctgatcttttaatgcgaacagaaggtaggtcatagcggcatccgcgcttgcgttgccctgggttgcatgggcccagtcaacgattgttttcttaccgtcatcactgcaaataacgttgcttggattgaaatctccatggcagagtttcacatgcttcggcatgctttccagccgggtcagcagttcatacctcgtcgtcgcgtccagatctttcagaccgttaatctggcgggaaagcttatccttcagcttattcagatgagacgatgttttgccgtgcatttccagttggagatctacaaattcctccatataggcatccagattctccgggtgttcttccatcaattcttccagagtctttcccggctgatattccaccagcagcgcccatttcccatctatctgcgtcacttccttaactcccggaatccggagtccggctgcctcaactctcgcagtattcaatgcctcattaaacacatcggccttgggatgtgtcttttcaaatatttttacaataccctcttccgttttatacacttctttgtatgcgcgctttactatcagatttttattttccagcttcattcttattccctcccggcatcactgtttacactgaacctattttccatagtagcatttcagataaatctctttgatttctttcatcagaggatatctcgggtttgcaccggtacactggtcattaaatgcctgttccaccatctcatccaatgtatccaggaagtaactctcgtctatgccatattccctgattgtctttttgatgccgatcttttccttcagcacttccagttttgccaggaagttttcaaatacctcttcatccgtgcttcctgcacagcctgcgaatcttcccagctcagcataccgctccagcgcgtggggatactggtactgggaaaaggttcccatcttcgtcgggacgtcatccgcattatagcgcatcacttctgtcagaatcaaagcgttggcgacgccgtggggcaggtgatggaaggcgccgagcttatgtgccatggaatggttcagtccaaggaaggcattggcaaatgccattcctgccagacaggaggcgttggccatcttttctctggccgtcggatccccggctccgttctcgtaggccgacggcagataatcgaataccatcttcactgccttcatggccagtccgtcagtgtaatcagacgccataatcgatacatacgcctcaatggcatgcgtcataacatcgattccggatgcgcttgtcagccccttcggctgcatcatcatattgtccacatccacaatcgccatgttcgggaggagctgataatcggccagcggccattttactcccgtctcagcatccgtgatgatggcaaaaggcgtaacctcggaacctgtaccggaggatgtgggaattgccacaaaatatgccttcttccccatttccgggaaagtatagacacgtttgcggatatccataaagtccatcgccatatcctcaaaatctgcctccggatgctcatagagaacccacatgatcttggcggcatccatcgcggaaccgccgcccacggcgataatcgtgtccggttcaaatgcggtcatctgggccgcccctcccttgcacactgcagtgtaggatccggggccacttcgaagaagcaggtatgcttaattcccatctcatccagcttcgcctcgattggctttacatatccgttattatacaggaagctgtctgtcacgataaacgctttcttcttatgcataatcgtacccagttcatccagcgccaccggcatgcagcccttcttaaagtagactttttcaggcgttctgaaccaaagcatgttttctctcctctccgcaacggtcttaatatttaacagatgttttacccctacgttctccgatacggagtttccgccccaggagccgcatcccagcgtcagggaaggagccagtttaaagttatagagatccccgattccgccgaaggaggagggggtattcacaagaatacggcaggttttcattgcggcggcatgctttgccatcttttccgtttccgcaggatgcacatagagggacgccgtgtggccgtatccgccgtctgcaacgagctgctccgcctttgctagagcttcgtcaaatgtttttgcccggtacatggcaaggacaggagaaagcttttcatgggcaaactcttctgaaatgtcaacggattccacctcaccgatcaaaatcttcgtattttccggtacatccacaccagccagcattgcaatctcataggcggattttcccggaatcctgctgtttaaggcgccgttgatgataatggtcttgcggactttatcaagctcctctccttttttcaggaaatagcatccgcggtattcaaattccttttttacttcatcataaatgctgtccattactgttacggactgctccgacgcgcaaatcattccgttatcaaaggtcttggagtggataatggaatttaccgccatcttcacatccgccgtatcatcaatgatgactggtgtgtttcctgctccgactcccagtgcaggcttaccggacgaataagccgattttaccataccgcctccgcctgtcgccagggtgatatccgcctcccgcattaccatattggtaagctccagggacggaacatcgatccagccgatgattccttccggcgcgcctgcctttaccgctgcttccagaacgacttttgcggccgctatcgtacaggccttcgcagccggatgagggctgataataatggcatttcttgttttaagacagatgagggttttgaaaattgcagtcgaggttgggtttgtcgtcggaataacggctgccaccaagccgattggttcggcaatctttttgataccgtaggcaggatcttcttcaatcacaccgcaggtctttgtactcttatatgcattatagatatactctgccgcgtaatgattcttgatgatcttatcctccacaatacctctgcgtgtttcctctaccgccatttttgcaagggggatacgctgtttgttagccgccatagccgcctcgtaaaaaatcttgtctacctgctcctgtgtgaaggctgcaaactttctctgcgcttcacgcatagcctgcatttttgcttccagcgcttccacgctgtctacgattgcgggtactgctgcttctttccttttcgccatttcagttttcctcctgtaattgtaaatttttcctatggctatagtataccgcattcgttaaataattgtcaatgactttttgataataaattaacaatatttttatccgtttactgctctcccgaaaatttactgtaggaatccagaagcataccacagagtttctcttttcccatctgctgcagttctcccatgctctcagccctgttccatgaaaaaaccgctttctgtttttcaaggctgccatataccgtatcggctatgccgtcatactggtctgcagtgatattctttccctctctgtccgtacagtcggtcatctgtttctcattttcaaaaacagttgtcttatatgccagatcattttgaactattttcccgttttcaagcgatacggctctcttattttcataatactctttgccgttcctgataatatcatcataaatataatagtatactttattctgagcatcgtaatatacaggtgctgaatccacaataatatcggcctcggaatgcccttccatcctgtttccttccactgccgtgaggccgtcaaacgtatcattcacctcaaaataatcactgtatgtgtaaaggccggtcccctggcagctggatacgattagctccagccttccgttgcggtccatatccgtcaccgtgaaaaaataatcaatgccttcgctgttcattgtccctgcccacagttccaagctgtcagccagaagttctatctgtttttctatattattcctctgtatgccggactccatattctcagatttatacctggcaatcccctccataaccagattaatgctgccgttgtaatgattcttctgcagaaattccgtcaatgacccctgctctaaagaaaattctttctttcctccggcctgtgtataaagccgcacttcattatagcctggctccgtgctgccttgccgggaatactcattaatgatgatgatatccttttttccgtcgccattataatccttaaatgaaacggccgcgactttgacgaacttcagagatggacggcggttatcctccgtcattcccggtaagtcaaagagcgccttcccgtcctttagcagtttaaagtacacatcaccgtcacccgcctcattctcttttggcaaaaatgcggcaaaggtcacttcccccagccgtccagcgttacatcaaatgtctgatcttcaatctgctttcctgttgtctcctgctgcgtgccgtcatctccggtattcccgcttccgtcatcaatttttatcagtccttcgctgctgttttttgcagccgcactgctaccgtcctgcgctcctgctccgatttcagcttttttcgcacagccggacatcagcccgagcaggactgccagacttaatattgtcaattttcttttcatatccgtttctccacctcttatctcttgttactgatcacagccacgctgaaaagcgcggttctgcgaacagtaacgatctactgcctcatgtattactgcaatttcaatataattcattgcagttatgattacaacttaagaattattacgttattattcacatgcagtatgatgcgaggcgtttatttcacggaccggttaaagagcggttcctttgaccggcacggtcagtttctccatattcaccccttcatgcctcagcagccacatctttttgtcaattccgcccgcataacccgtcaggctgccgttggagcccactacccggtggcagggaataataattgaaatcgggttatgtccgaccgctccgcccaccgcctgcgcggacattccgggcttgttaagtttgaccgccatttttttggcaatctctccgtaggtggttgtctctccataaggaatatcgcagagaagcttccagacctcctgacggaacggtttgccggcgggagccaggggtagctctccgattgccggattctgtcccgaaaaatagcgttccagccagttcacggtcttttcgaatatgggtaagtcatctttctgtgccatttccccattaagggtaccgccaaaatacttttggttttccagccaaagccctgcaagggccgtaccatcggaagcaagtgtgattgtacccacgggaaaacggcacgttgtttcataatacatcagataatcctccttttataatgaattccaaagactgattgcggcatagctgcgccatggcctccatgcctctgccattttatacatttcttttgacgtacggcctccaagggctttctttatgccggtgtccgtctcaagaaatgcatccgtccactgcatggtccgcatcgcaatgtactgcgcttgtctgctttttcagtcattatatcatacaatccgtcaaataccggctgttttcggacatgcaaagaagatttaagcaggtgaggacgccgccgggacggccggcggacggggccgataaccctgacggagtctttcgtcccggcgaaaaccttccgggagaaggagatactgtcgacatcttccggcggagccggagagaatgaaatccggctccgccctgcgaaaacaaaaaccgcagtatctccttctccagccagcgatgccacttccccgggacgaaagactcatatacacacctcaccaccccgtccgccggccgtcccggcggcgtcctcacctgcttataattcttcataccgttaactaagtaatggcaacagattctgcaattatatcaataataacgtcttgacacccgacacccaaacatttaaaattattctctaaataacgcagacataacagcctgcaaattcactcggaacacaatgcctgatatggagtattcatttatgttagaacaagatttgattaccgcctctgcggaggatgatatcatctgcgccgcagcctacgcaggtgaggagcttgccgccgggacatttaaaacagatttccagagaacctcttttacatcctgccgcttcgcaggctgcgacttcagcggcagctcttttttcgatacgagctttacgaactgcgatttttccaacagccggttcagcggctgctattttaaaaattgcagtatgaacggctgcaagggggatggctgtgatttcagccagagtacctttatcgcctctgtcctggaaaaaggcacctattgctatggaaatttttcaaatacattatggaaagattcttccatagtccaggcaaagttctgtatggcctacttatcggacagcaagttcaaaaaactgaaatttgaccaggtggacctcacccgggccgaatttttccatacatcattaaaaggcgtcgatttgtccggctgtctcattgaaggcatcactgtctcagaatccttcagcgaactgcgcgggcttaaaatcgacgcctcacaggcacttgatattgcattattactcggtgtaaagatataaccggaatttttgctgatgtgtgataaagaagtagtagaagtgtaaaaaattttgccgttcctatccggcgtttgcgcattgcgccggataggtcgggcggtcattcgggcaggtctaccttgccaacgaaagagtaataaatatcaatgtcctgtctgcgtgtgccgttctcgtcatagctgcactcatgcacaacgattttctccacaaactcacgcaaaagggtaggggtaagttcttcaaagctggtgtacttgcggacaacattcataaacttttctgcgtttaccgtggcttcctgcgctttggaaagctctgcccggatagcggcggctctctctttcagttctttctgctcggcttcatagtctgccgacagctccgtgaaacgctcgtctgaaatgcgcccggtcacgctgtcctcatacagccgcttgaagatagcggataactcgctgatacgcttctcggcggcttccagctcctttttccttgcggcgttcctgcgcttgcccccgtcctcgttctgctcgatcagcagcttcataaaccgggcttcgtgcttcgctgcatagctggtgactttccgcagattgtcggtcactccggcggtcaacaggtcggtgcggataaagtgcgccgtacagtcacgggtacgcttcttgtagctcccgcagatataacaatcctgcttgcgggtggcgttctggtaacgctgctggtaaaggacgctgccgcagtcggcacaaaagagtatgccggagaataagcccacttcatcatagcggttcgggcgtttgcgctgcttgcgtaactcctgcacacgctcccacatctgggtgtcaatgataggctcatggtggttctcgaaaatcgcctgtttctcaatggggttctctacgctgtgcttggtcttgtaggacggcttctccgtcttgaagtttaccagacagcccgtgtactccctgttttcaaggatatgtaccacggtattggtcgcccacttgcactcatagccggggtggtagcggcgggtgcttcccgtccgacggtattccagcgttcccggcgtggggatctcctgctctgtgagcatacgggctatcttggtcggcccgttcccggcaaggcacaagctgtaaatctgccgcacaacaggggcggcttccccgtcaatgataaaattttcgtcctcgtccataaagtagccgtatacgggtttgctcgtgacgggcttcccgctcatacccttagaccgttttactgctttgattttcttgctcgtatctctcaccagccattcgttaaaaatgttccgcagaggggcaaaatcattgtcgccctgtgcgctgtccactccgtcattgatagcgataaagcggacgcctttctgtgggaaaatcatttccgtatacattcccacttgcagatagtttcgccctaaccgtgacatatccttgacgataacggtgccgacttttccggcttcaatgtccgcaagcatggcttgaaaaccgggtctttggaagttcgccccagaataaccgtcatctgtgtaccattgcagattggaaaagccgttctgcttcgcataggtttcaagaatacgcttctggtttgaaatagaattgctctcaccttgcagctcgtcctcgtgggataatctcggataaagggcggtaataaggtttcgggtggtctgtcttaacatagtgtcctccatttccgacagccagccccactattccgtatgactatcataccacacgccggggctggctgtacagtcctttctgcttctttacgtcccgtcaaattgccgatttttgtgtagcagcttccgcttccagcactttcagcattttatcggcggcggtggcggtggtgtcctgcttgaaatagccggaaacgacaaggacagaattacctatgcggatttccgtcacgcaatccgggcggcgggtgctgcggtcattctttggggtgttggtcataggcggctctcctttctgttcatcagctttttcagttgtcccattttctcctgcgccgtggcttttcggaagttgctcccggtaaagcggacaggagaacacatttcaatcagacggtcataaatgcgggcgtgggcggtgtcctccgggtgctgcaagtcctccagcgtgagattagtcgtgacgatcagcggcctgccgctgcggtaacggctgtcaatcacgttgtagacctgctctaagccgtattccgttccccgttccattccaaaatcgtcaaggataagcagcgggaagctgcaaagtcgggagatatattcattcctgccctcaaagctggcggcaaggtcacccaatatcaatgcaaagtttgtcatgcacacggggatttcacgctccataagggcatttgcgatacagcccgcaaaatagctcttgcctgtgccaacgccgccccatagcagatagccaatgttgcgctctttcatggtttcccagttctccacatagaaatgggcgtgttccatttgcgggcacttgccgttgtcgttctcaaacgtccagccctgcatagccgggtctgtaaagccccgccgcttcaaccgctcgacagtttcaaggtgactgcgctgtttctctgcggcttcccgttcctcacgctctgcccgctggcagtcacattctgccgggtggcggtcacgccccagccatgcggcggtttctttggggaaatagccctctttgggcttgtggcacttcccgcagtataaaagcccgtcctcgccggtgtagtcctccggctccggcgtggtgtcggtcatattcaaaatcatttcatcaaatccattcgtcataagctctcgccctccttacaggtataatcgggtatgccctttttcgggctttcttggctgcgtcctcctgcgcccacttgaaaatcgtggctgcatggctcttgtatttcctcccgctggaagcgatatggcaggataggcggtcaatgtaatactcccacttgccgggaagctctgttttcagcccgtcaagctccgtatcggaaagaatgacattgtggtatctgccataggcggcgggggcggggtgtcccgtttctaactctctctctttttctatttctatatctatctctttctctatctctatctctggtggacaaatgtccgctcgatatggtggacatttgtccgcccctgtctgcggcagggctttttgttcctgcaaagccagccgcgccctgcgcttgcgctccccctcggtagaggactggccgattaaaagctcaatgttgctcatgtagagtgcgccgcttggcaaaggctccacaagccccagcttcataaagattttcaaagctctctctacggtacctacctgctggcgggtaatggtcgcaatcatctgggcggtgtaggggatattctcgtcaagctgcaatttcccgccgtttttcagcgatttcaagtacagcttcaagagaatgttggaatagataacgccgtcctgcatactttccagcagaacgattgcatcatcgtcaaaatagctctctttcagcttgaggtagtaatatttgcggttatctgccataggctgcgtcctcctttttccagcgtttggaataatagcgagggcatagtatgataaccgcccggaagctctgtttgcagtcacgggtgcagccccggcataggtcgttgtaagtgatacggttgcggtggttgaggaagaaagaccattccagccgccgcttcttgctcattctcggcaatggtaagctcctttctgccgttcctatcggtgtagcgggatagggggcattttctgtatgttctcggtatcattttcgggctttttctgccctgtaagccccgtttggaagtcggggagtattgcggtaagggttcatatcatacctgtatttttgtagggtttcggtatcatttcggggcggtctttaacgctcctgttcacgctttttctgctggctcggtgcgccccttaaaatctggtcgatattgcgtctgactgtctgaagctcctgcgcccgctggcgtttctcccggtagtcgttatatccggcgttcttctggacggtaagctgctcaatctccctttgcagggctttgctggctggcagcttggttattccatgctcccggaaataacgggcggctgtgtccgctatgataaaatcgctttcgtgctgttcccggtaggctctccgggctttctccgatttctgcgctttcagaccgtcacgggcgggcttcgtgccgatatagcccaaaaggttgcgctgcaattcctttttctcccggatagcggcttccagccctttcagtccggcaaggctctcctgcgtggcggtgttggctgcggaaatggcagcgtccagctcgtccggggaagaaaagccatactgctggtagagcatgagggtagccgacatctgtttgaggttgtgcatggtcgcccacttctcatagccccgtcctttcccctcggctcgcttggcggctatgtctaccatgcgctgtacagcgtcattgttcggggcgtttttcgcttcttttttcgtccgtaagcggtctttgatactgccggggtattccgctatggctgcgggtttttcggcggctctggcggcgttctgctccaaaacggagaggacagcagcccggtcaaaatcgtcccccagcttccgggcggtaattggcttcgtcctgtccggcgtgaggtaacttagccgcccccggctctccttgacggtcacaccatgccggagaagcagggcggcaaactcatcaaagccggaagcagcggcaagggcttcccggatagtccggcgcagcttcgccttatccgtttcaaacttggtctgccggggcgcgataccgtccgcagcaataggggcgttggctctgtcaagggcagcctgtcctttcttctgcgcccaatactcacgctcggtaatgcgttctttgctgccgttcaaaaggtctatctggtaaagcccctcgctgtggcacatctccatgacttcggctttcagatagttcatagctgcgtccgtacagcggtgcttgcagcctgctttcctgtccgctggcctgtccatgtggggcagcatgggaacctccgcaatccgcagactgttaatgacgatatgcacatggatattttcggtgtggctgtgtccgtccgggtgggtgcagacaagggcctggtgtccggggaaatgctcggcgcagaacttctcgcccagctcctgcgcccgatcaacggtcaagccgttgtccgggccgtcccgtgggtcaaagctgatgatgtagtggtggctctttacgtcctcccgtttctggttcttgccgtagcggagattggagcgcatacaggcaacggcaaaatcctccccgccacaattcagagaggatatgcggtagtctaccctcggtatgagccgcccgtctgcgtcaagggtgggcttcatggtaaactcgtcatgctcgaatgtgaggtatttttcagcgtccccgtagttggcatttttagagctgatatgtttgagtatcgccaacggcttcacctactttctgcaagacttcaaacttcaaggcggcaaggtcggcggcggctccccgcacttccttttccagcccccggtaggggcttccgtattcgttcaggctccgggcaatctggtttaagttgccgccgattttcccgtactctgccgtgagcttggagagggcggcaagcagcccgtcattgaccggggaaacggtgacaatggggcgtatggtcgctttccgtatggcttgccggataaactcggactggctgatttcataagccgccagccgcccggtgaagtcggcgtattcttcatcggtcatgcgggtctttaccacatgacggcggtggggcgtattgtatttctttcgcatggtctgtgacctcctttctcgcccgacagggcgcatagcagggtttggggaaggcactccccaacaagattcccgcaggggcaaaaataagcggagagcgaattttggcacctcggtagaatcttgctctgaaaaactccggcgttccccggctcccgtcctttccgctaacaaaacgtttcaaaagggctttgctacccgctattccggcttatcttgaaaattttcctttcactacctacaacaccacgcaaagcaaaatggacggagatttttagaatttcccctctattccctacaacaccacgcaagccggaataggcggacaatggcagtatttttttctttgataccctctacggataagtaagggattttgccaactgcggcggctattttcccttttgttttttcatactggggattttcaaaaatgccaaacaggaacgaaaaaaagcagcaaatctgttgaatagatttactgctttctggttgccggcgaagcggcggttattcagttgtaggcggtagggctatctcccaaagcggaacttgaaaatagctgtgagaagcgtctgggtgatgtagtcctctgtatcttggtctacccgtccattcacacgggcggcacattgtatgcggcggcggtaatactgcaatacagttcccaccgcttccggctccccgctggcggcttggacgattgtttcataggggagaagcctattatttctcatatgccattccctccatttccgcttggagctgccgtagggcttttcggatatggtagcccgctgtgctgcggctgcgcccgtactgtctgccaatttcgtgctgtggaatacgcttgaaaaaggacaggtaaatcatttcccgctcccgttcgtccagccgtgacagggcttccgcaagtaaaccgctgctgaaaatgaccgtatcgccgcaaagggtaagtatgtattcctcgtccggctccggggcttggaaatattcatctgtcgtgcctaaagggtagtgcttttcgtctgtgaggtattcaagggatatttctcttttgtgcttcctgctccgtgtcctcgctgcgttgatcgttgcatttcggataacgactttgcaaaaggcatggaaagtgtactcgatatgttcccgatattcttctgtacaggtcatggaaaatccccctttcctcccaaaagggctgtggctggttagtagttgctttttatgatagtaaggggcggcagcactttaggctgtcgctccttgactgcctaactgcaaaaccgggcggggctgtcaacggcgggcgaagcccgttcatcttgaccgttgactggctcggccgggtttgctatttatccggcaaacttgaatttattttaagctatcacgttttacctttttaagccttactatcattaccataggaatttctttattgtttttgaaacattcttcataaaatccatcaatgacaaatccagctctgaaacaaaggttaaaaatatcttgtatggaacgatgataataaatctgctcctccggctgcccttcgatcgctatatcatagtaactgtgcggtgtcatatatttttcagtcaatgtgataaaacaagggtgctgcgttgcaaagacaaaaatcccgttttcctccaatagttcataaacagccataaaaagcggttcaatatccgtaatatccataattgccatattagaaactgctttcgtaaaggctcgatttctttttaatcctaataagctttctctattggtcgcatccgctacgcaaaactcaatttgttttgcatattgtgatcgccgtcttttagccaattctatcatttttttgctgtaatcaaaagcgacgaccgaagcgcctctctgtgcaagatacgaagaataatttccattgccgcacgcaatatccaaaatgtaatccgaaggatcaggagagagaagttccgttactttgggacgtactacctctctgtgaaattcattggattcgtcacccattgcatcatcccaaaattgtgcgtttttctcccagatctttttgctttcctctgttcccatgttctctcccactcccaaaatttgcctttttgcttccattaaatcttccttactatattccattgttaccctccataacttctgattgttgccgtcttgactattatgtatcttttctttccaaaatggtataggcttttatttttataatgctgcaaaacttttcttctgtaaggtattcaaaggatatttccctttgccgccgctattggaaagccaaaagcagcggcttttttacgcgatatgaccgaaaagactagaaagcaggatatgtcatcatttgtcatttcttctcaatgtaataactgcatggcatatcaagccaaatacaagagaaaaacagccaccgccaaatagtgatgctccccaccctgcacccgacattgtcataaaaccgccaacaaagaaaataccaatgccaagaaatatcccgacaccataaaaaagtccaattgccatatcatacttattaaattgtcgtttctctttttttcacatgtttccatttttgttattacctccttcgcaaaatcgtccatgtggactccaaaaagaaaacaaatttttttcaacgtatttaaatcgggttcattaacatctctctcccaattcgatagcgcctgccgggtaacattcaatttcccagccagttcttcctgtgtcattcccgattgtgttcgcagatgacgtatttgctttcctgttgtaatatccgtctgtttctggttcaaaatggttcctcctctctgatgctgattttatcaatgatatttcgcaatagccagcaatgaacgtttgcattgcgcaagatgttacattatcttctgaaacatatgccggatcttgtctaaacggctgttcgggcggcgtggctgaaacacaggctcgccggaagtttcctgatacccttttaattctgtaatgcagacacttcttccatttgtataaaaattcaaatcatttctatattcaccaatacaacgggcagggatttcccccttaaaaataacttcatctttttcaagtctggttgattcaatgattgcgcaatactttggtgcgtcattataagcccgtgaaagatattcctgcggtgcaaaaagggtaaaggaaaggtatggttccaacagttgtgttcctgcttttttcaatgcctgctccaacacgacaggcgcaagaaaacgaaaatcagcgggggtgctgaccgggctgtaataaactccataatcaaaacaaatttggcagtctgtcactccccagccatataagccctgctccattccataacgcacaccctccatgacggcattttgaaaactttggtttaaatagccgagagatacctcgcttttatattgtgttccgcttccaacaggaagcggtgttacagtcaaaccaatagatgcccaaaacggattcggcggcacttcaatatgaatcgtgtagctcgcttttttttgcggtctttccagataaataaccgaaggctctttcatagccacgcccacatgatatttttcttctaatagcgaacaaataacttctaactgtacttttcccaaaaaagataatataatctcatgtgtaacagtatcaatgtcaaaatgcaaaagagggtctgtatcagcaatctctgtgagggcatttaacagggcttccctttgctccggcttttgcggctctaccgttgtccgaagtaatggcatgggattatcaatccgtgttttgtgaggcaggagtttttcatttcccagaatgtcgttcagtttcaaagtatcatcagctaaaataacaatttctcccggacaggcatggtcaaccgggacgatttcaccatttgacggaatacacatttctgtaatctttattttttccttttttgacagcagcagggtatcccgtaaatggagcgtcccatgatacaggcgtaaataagaaagccgttttttccgctctgtatactcaaccttaaaaacatatccacataattcagactgaatatcgtctgtttctgtaatgaaagtttctgtaatcgcttcaatcagtttttctgttcctaaattgtcttttgcactcccatgataaacaggaaacaaagagcagcatctggttcttttgcacttttcatattgtaattcctgtatatccaaagaatcctctgcaacatatcgttctaatagttcatcgcttccggaaataatcatatcccatttgtccaaatcagaaatatcggtcatggttatctttggcgacagggaaacctcctgcatgacaatcatatcactggtaagtttatctttaatgctttggtaaacacgccgcaggtcgatcccattttggtctatcttatttataaagataattgtcggaatgtccattttctgaagcgcatggaataatatacgggtttgtgcctgtacgccgtcttttgccgaaatgactaaaacagctccgtcaaggacagataaagagcggtatgcttcggttaaaaaatccatatgaccgggagtgtccacgatattgattttataatcattccagcaaaaagaagtaaccgctgtctgaatggtaattccgcgctgccgttccaaaatcatagtgtctgttcttgtagttcctttatccacgtttccttgttccgcaatcgctccactggtgtacagcaggctttccgtcaatgttgtttttcctgcgtctacatgggcgagaattccaatattgattattttcatgtgattgtcctccttttacagccccaaaagggcataaaaatccccagcagtaaaatacttttaccactggggattataatttgcggacatacacatatacagcatacacctgtttgtgattgctgtttttcggatatgtcaaaattgataaggcaaaagtattcttaaattgggtacaaaaaaccaagcccccacaaaagggactatcataatcctttgttcccactatttgattatagttttatttaagaataccttgccgcatattttttactccttttttggaatgatgctattatatcacattagttttaggaaagaaagtacctaaaagaaatttttcttccccttatatgtaacaatcataccgactttctggcgttcagaatggtttctgctgtctgctgtggtgtttggttggaattgtccagccaaaagccgatccgtggtgttgtctgcataaatgtatcgtataaggtttcaaccgtaaagccggaatagcctgttttctccctgtatcgttcccttccttttattgtttccacatctggacaaagaacgacaacctcaacagggtatttatgcggcacaaaaaatatgtacatgtaactaattcaacacatttataatttgaatagggacattatagcatttactaaatacaaattcaatgtatacggaaataaagatataaggagtgggaaggattccgccgtagtcggcattgtaggaaaatccaaaagtttagattttcccacaatgcttatcttttggtctttggttcggaatagtgtagtgctggcggtctatctcttgttttcggttgcttgcttccttaccgtacatgagcattgtttcacggcatatcggattgttccttccgcagaagactgcatgcaatcactccgccgtactctccggcctctaccctgattgtataaataccgcttcctaatacagtctttaactctccccgtttccccggctccgccccggttttgcttgcgccgtccatatgttccggacgttcgatgcccatacctgcgacctcctggccattctttgtaatgcttatatcggctgtgcctctttttctgatatattctaccagtatcattccttctccgcccagaggcacggtaaaactcttctgtacggaggcgctgatattctcatcttcaaggcgcatcagtatttttccgtcctccccaaatagctgagtttcttcaccaggccgattaccggaccggttccgtacaggagaatggctgctgcggaaataaacagtatgactccggatataattctattttttttcattttataccatccatcctctcccggcgtctgagccgccgtttataaaccgcctccatggcaccggaccggactgccgccagtcagcttacgctctagcttacaatcttcatataaacacgggaggtcatcatatagaccgcacagtaggctgcggcgaacactccgaaggttcctgccgtacaccaggcgaacagctttacattcgtcatattcatcagtgccagaagccttgcaatcattggaaaagcaaacattatatggacacccgacgccgccagcggcagaaagaacatcatcagtatctgggaacggatggagcttcgtatctcagcttttgacagtcctaccttctgcatgatttcaaaacgtatcttatcgtcatatccttctgtaacctgtttatagtagataatcaggaccgtcgccatgataaaaatggctccgaggaaaattccaagaaataataatcctgcatggagcgaaaaatagaatccccactcttccgctgccgcctctcctcttatgggaacggcaagctccttcattctgtccataatttccgtataagcctgtacctgcatctccccgctgccatccaaatcaaatgcatattcatactgtattccccgctctgcagcaccgttcaactgcatatccatcaaaaccagcttcttcatttcctccatatcggcaagaatcacataaaaggtcccgtaggaaccaaaggagctgcccgtgtcccaaagctgcgcctctccagatggaaccgtccggtaggttctgccgtacagggtcagactgtctcccctataagggctgtcgcctgtaaataccactgcttcgccgggtttcaggctaagctcggcccccatactccggttgtagtcatcctgggtaatggcacagaccgttctgaccctgtttaattccccgctccgcttcgggtcaaccggaaccagaacccccggcgtctcctcggacgccgaaaatacaaaatccttgtagcgaaacgcattttcctggcacaggcccttctcctgaaggacgtcggccacaatctgatccatcctttctctcaccgaatcgtcaatatcccccgtcttaaggctgatatctctgacaaaacgattctcaagaacatcattgattccgctgtacagggataccgtagaggaaagcataaccatgactgatgtggaaagaacacagatccccgcaagtcccgccgcattctgcttcatcctgtaaagcattccggaaacagcgataaaatgctccgttttataataaaacgtcttacgtctcttcataaatttaagtattgcggtgcttccggctatgaacaggcaatatgtcccaattattacgaagattaccgcaacaaaaaatccggttatcagggaaatgggattttccgtaacaacggccatatagtatcccatccccagaaaaacaatgcctgcaacagccgtaatccatcttgttttaggttcccgttccccttccagtccgccgcgaagcagttccatcggactggacacgtggactctggccatatttacggccaatattaccaggaagagacagccatagaaaataacagtaaccgccgccgcattcccggaaaagtgaaatccccactgcacttctgccctgaccatgcgcaggagaagaagataaacgccctttgacagcagaaagcctcctccgataccgccggtcagacttatcatggcgattgtcactgtctcaaaaaacataatccggccaatatgctttttttccatccccagtatattaaacaggccgatttctgtttttctccgtttgataaggaaactgttagtgtaaaacagaaacagccctgtaaatacagcaatgataatacatcccaggcacagtatcatccgcatattgctgccaccgtatatatcatctaaatccgtattgagcgacagggaaagaagaatgttaaataccataacggaaccgatacaggtcagtatatacggcacataagtgcgggaatttttcctgatattctgtgctgccagcctcatataaaataaaatgctcatcgcctttcaccgcccgtcgcaattactgtcagcgtatccgctatattctgatacagctcctctgaattcttccctcccctgtaaatctggtggaacacctccccatccttaatgaacagaacgcgtcccgcatggctggctgctttgacgctgtgtgtcaccatcagaatcgtctggccttccgagttaatccggcctaaaattttcagcaggccgtccgcagccctggaatcgagggctccggtgggttcgtccgccagcagaatacgcggatttgtaattaacgctctggcggcggcagtcctctgtttctgaccgcccgatatttcgtatggatatttatccagaatttcactgattcccagcttttctgccagaggcatgagtcttttttccatctcatcatagggagttcttgacaataccaggggaagaaagatattatccctgattgaaaatgtatcaagcaggttgaaatcctggaaaacaaaacccaggttattcctccgaaacgctgccaaatccttttccctgattcccgccatgtccctgccttccattaagaccttcccctccgtagggcggtccagggatgccagtatatttaagagtgttgttttcccggagccggactcacccataatcgccacgtattctcccttctccaccgaaaaattcacatcggaaagggcctgtacccggttgccgccaaatcttgttgtatagactttctttaaatgctgcacttctaaaacagccataggtttcctcctttatatgggataattgtatgtaactgtattatataaaagcgcctgtcggactgccatcgatacggcttacattttttcccggcaaccttacatttctgtaaggtaacttaacggtaacctgcacgctccgcgcacaggtcaccgtcataagttatattctctactctgtttcaagctgtaccgtatccagatgaagcctgattttcgtccctatcccaggttctgattccaccgaaacagtatgggaaagcctgtttaatatccggcggcacagatagaggccgattcccgtggacttcttatcatggcggccgttgtatccggtaaagcccttctcaaatattctgggctgatcctccggcgctattccgattcctgtatcgctgattaccagcaccttcccgtctccctcctctatatagatagaaatacctccctgctttgtatatttgattgcattggaaagtatctgttctattacaaaaaccagccatttttcatctgtaagaacgacagtttgcggcggcagataattgagagtcagcctcttcctcacaaacatacctgcatactttcggaccgcctgccggacgataccgtccagctcatacgtcttaatgaccagatcgtttccgccgtccagtctcagatattgcagcaccatatttacatactcttctattttaaataactgttccgccagctcaccattctccccgccaagatccgcgcctcctgtctgcagcagaagccgcatggctgaaattggcgtcttaatctgatgtacccacatggtataataatccgtcatatcgcctttcgattcctcgaagcggctgctcatcctcttccgatcttcgaagagcatgaagataagcctgtgatattcaagctccatcgctgatttcgcctgcggaagctcatccagataaaagctgtccggatccgtcaaaaattccttcctgattctttctgctgtcctgtattttctcctgaaccttctgtaacccgccatgagaacggcagccgtcggaaagatgcagagtgccgttgcatacagcactgcttccgcaggaagacggtacagataaaatacgcatgcaaatatacagcaaaaaagcaaaaagaggccaaaaggccccctgcactccgcaagatagatacgaaacagctctgccttcccggtttcacctgtctgcgttgtctgatatttaacgtctcctttttttctgtccatattttctctttctccctatcctatcagataaccgcttcctttttttgtagttataaaatcagacagccccgcctgctccagtttttttctgagcctggtgatattgactgtcagtgtattgtcatccacgtagctgtccgactcccacaagcgtgtcataaggacatcgcggcttacaatttttcctttgctttccagcaggaccatcaatatcctgtgttcgtttttagtcagctctatcttttcactgccaaacgttagggtcccgtcatcgcagttgaaaaccgctcccctgtgttcaatcagccggctctgtcccgcaaaatcatacgtccgccggagcagggcctgaaccttcgccgtcagcaccgtgagatcaaagggttttgcgataaagtcatcgcctcccatattcatcgccatcacgatattcaggttatcggaggcggaagaaataaagatcaccggcactctggagactgcccggatctgactgcaccagtggtatccgttataaaaggggcagcgatatatccaaaagtacaagctgaggctcaaatgacgtaaattccccagaacattttcaaaattttccaccgtcttaacaatccatccccaggtttccaaatgcttttccaaagccgatgctattaccgcatcatcttctacaatgagaatccggtacatattattgccctcctccgccgcgctttatcatctgaccttgaaccgttcccttactccctctgcccgccacggctccttctgaaaaatgtctcggccatcaccgtcagcaccagtccccaggagcccacggcgcggagagaataggagaaatcggaattaaaaaaatcttccagccactcggtattccagagcagaatcgtaaaaacgcaggcaaaaaacacctgatacaggatatcaaatccggtcacttcttcctttttctcagccagaaaaagcaccagcggcagggtcaggtagatgagcgtataggagccgctccagaccggaaagaaaatcatgattcccgacagcagcaccatctttttccaaagtactttttgcaggagtacacagccgcaggacagcaggaagaaaagaaccgaaaccaccctcccggcagccagcagaaacggcagggacatccccattttctgtccgataaagaccgtcgcgtaggtagcgcttctcaaatcgccgaggacaatttcattgctgatcgccttaaaattataaagcagcaccgggattttcccgaatcctccaaagaagataaacggaaagaaaaccaggaaaaggccgtaaaccgtaagtcttgcagcctccttccatctcctctcctgcagatacagaaggccaaacacggcaggatacagtttaagcccggccgccactgccagaagcaggatagccgcctccctcttccatgcctcctttgaatccttcagggccgtaaacccaaacagcagaaggaggacaataaaagcggaatttccccgctcataaagtccgataaaaggcgccgacagcaggatgataaacaagagcaggcactgctcctgccgttttttctctctcaggaaatactgaaccaaaaataccagggccaccaccaggaccgccgtatacgccacatacagattcaggccaaacaggttgtcccttaccgccctgtttcccgggccttcaaccgcgctggccggaatgaatttacccagaaagtagtagagtacataggcaagcggcggaaagctggcatagatgctgctgtcataaacatgagccctgtcccggacgtaccagatgtggttgaaaaagtccataaaataatcgtgtccgtaataaaagaatgaccggaatgtttcaccattggtcttcagtatcaaaataaatgaaataataaatcccagaaggctgagaacgtaaaaaagattcttcctctctgtcatgtctggttacctctcttatctttattttagggcataaaaaagcgaaaacacctcgcggaataaatcgtggctgaactgttaccagtaacattctatcagctattatacaaactgatccgttttgttgcaaccttcgctgcaaatgccctgtcatgctcgacaaatatcatagtcagtctatgcgccaaaatcaactcctctatctgcatcctggaaaagacatcaataaaattcagcggttcatcccatatataaagatgggcctgttcacaaaggcttttagcaagcagaaccttctttttctgcccctcgctgtaatactgcatttccttagaaaaatgttcccttgaaaagtcgagttttctgaggatagcccgaaacagcgtgtcgtccaatccatttttgccggtaaattcatcaatactgccaaagagccaggaggtatcctgggagacataggaaataatcagtccggacgcagtctccatctttccggacagaatgccgggagcatcctccgtgcccagaatcgctttaatgaccgatgactttcctgaaccgtttcttccgtccagaaccgcccggtctcccgcttttatttccagggacaaatgtttgcagaccggaagattctttggaggataccccagtgtgacatcctccattgccacaagaagctgcttatggtgacgaagggggataatcttaaggctctccgctgtctccacatccttcagcagcttttctttatcggaagctgccttttccatcctgttttccgctgatttggaacgtttcatcatctttgcggccttatgtccgatatagccgcggtcgggtctcagccctcccgttctcgtgcctcttttcgtcttttccaccgcgtcggaccagcgctccgcttgtctggccgcctctttcagcctgccgatttccttcttcagcttttcgttctccatggcttcaaactcatctcttctttgtttattatcccaccagcttgtaaaatttccctgtaccacctctatcgtattcttattcagggataacacatgatcaatgcactcatccataaacactctgtcgtgggataccaggataaatcccttctttctattcaaataacggctgaccgctctccttgcctccgtatcaagatggttggttggttcatctatcagcagaaaactgtgttccttcaggaataaaacggccagcatcaccttggttctctcaccgctgctgagcgtttcaaaggggcggtaaagagcctccgcatccatttccatcagattcatctccctgagcagcttccacagctcatagtccggataaagctcttccacgatatcgatcgctggtctgctcttatcccggacggcaaaaggaaaatattcaaattccaccgtagccgatatcgtaccgcggtactcatattttcccatcaggagatttaaaaatgtagttttccctctcccgttcctgccgataaaccccagcttccagtccgtatcgactgaaaaagaaacatcattaaaaatctcttcataactgccttcataataaaatgtcaaatgatttacctgtatttgtgccattcttccatcctccctttcgaataaccgctataccacaggacataccttcctgtgaaacgctgacctgttaacagagttcttttctgttaaacaaaaaggatgcaagaatattcctgcatcctgtatatcggttccgaaagccggccgggccggtatccgtcaggccctttgcggcccagacagcggacagcacatatcccggaatttaatccgacggaaaatgtactttaatatattcaaagataaaaggatatatattcttgcatcgcatgaaaaccgcactgcaaacagcaaatacgcctcccgccgttcagacagaagcagccgtatccgcatgatgcttatccgcacaatctgcatgctgattattaaattcattatctgcaagaatacatcttcatcctttcatctcccatctctttaacattgtttcaacccacgctcggtatattatcgtagtgcgaccgcatcctatacggacaagttgttaacgtctggttctataccttccatttggttcaattgttactataacagtcgaaaagccgtatgtcaactgctaaaatatccgccgggtttgggactctgaggactaattggagatttagttaagcaggtgaggacgccgccggtacggccagcggacggggtggtggggtgtgtatatgagtctttcgtcccgggggaggattgttgtggtttggggctgcgggcgaagataaagtctgcggagcacgctcccgctctgtgaaatgcatcgcgctgctaagctcggcaggacctcgctaatcagcgatggatttcaacggcatccgcagactttatcttcccctccgccccaaggccaggtattcgccgggacgaaagactccgccgggggtatcggccccgtccactggcctgcggccgctgaatgtctcacgcgttaagtgcggggcagaccttgtcgcggccactcagtgcttccgtgtgcgggaaatacgatatgccttcaaggcgcccttatgaaagaattgcggaagatttgatatcggcctgccggaaacacgtagtggtcgcgacagggtcctccccatttaaggttagagacaatcagcggccggaacggaccatgtccggtgacacgaaaaccttcgcctgagtcttccgtccctggcaaaaatctgccccggggaagtaggcggaatcaattgcggaggggacatgggagtccgccggtgcttagcgaggtccctcacgagcttagcactccgatgtgcactccaaagagtgcaaacggtccccgcagcaattcgttccggccggattccccctctccacgaccaacttccccgggacggaagactcagccatcccctctcaccacaccggacatggtccgttccggacgcgtcctccaaacctcagttaaatctccatttaaggttgtagacaatcatcgtccggagcggaccatgtccagtgtgcgaaaacctccgcctgagtcttccgtccccggcgaaaaactgattcggggaagtaggcggaatcaattgcggaggggacatgggagtccgccggtgcttagcgaggtccctcacgagcttagcactgcctcgcactccaaagagtgcaaacggtccccgcagcaattcgttccggccggattcccctccacgaccaacttcccacggggacggaagactcagccatcccctctcaccacaccggacatgggccgttccggacgcgtcctcccaacctcagttaaacctccataaattttaactaaatcttaacaccttttatttctatttcgatgtataatctgacttatcatcatgtgactgggaaaatatggcagattgaataattatgcatatcctacaacagggcggcgtaccctcacgtcgtcctgttttattgtccgcagggcgcttcctgccgggttctcacagatgtatcgcattcgtccaggcggttctcccgtaccggtcgcttacctggacacggatatacgcctcatctccccgaagctcgtattcccctctctgcaatgttcccttatagctcccacagaccagggcccggccgtcatttatatggtttcctgcgataaagtcgatccggtaaacaggtgaacactccacccaggcagtttgatccttaatcccccagccatagatttccggcccggccgaagaataataatttccgcttatcatgttcttcagaatctcttcatgggacaatctgtctgccctgacaacaatatatccgccgcaggcatcgtcaaaaaagccttcattatggttgtcatccgcagccaccgcggtgatccttttcccttttctaagcatcctgtcccagctcagataatcatatcccgtattgctctcattaacggtcccgtaattgaagatttcgagagcccacaaaccttccgtatcaatgaactcctccgcctctgccctggaccataccggatggttgtagatggtaagacagccgcggctcctgagatagtcgcacagcttctgcgcttccccggctccgtcccaggttccgtataattttgcgggttttacagcttccttctctctgaatacatgttccccggccgctttctgcatctgttccgtccccagaatcccgtgtatatgatgcaccttcagctttttatggggagcctcctcttcacaaagcgccacagacgcctccagcccgggcagaataataaaatcttcgcagtcaaactcgcttctgtaatccgtatataaatcgtgttctgagaagcagagaaagctgtagccatgttccctgaacagcctcacggattcttccggcgtcagttttccgtcggaattaacggtatggctgtgcagatttcctttataccagtttcctgaactgctgaatccattttgatctttaatcacgtttttcctcctgtaacaaaaacatggcaaccaagtgcagtggccgggtctataatgaaatgcagttgtgctccgccaccgacatgtaaaccttatcgccgttgtcaaacagcacacggcttctgaaaagcacatctgcatgaagcttcacgccgttcacattaatctgataccgcagaacattgcccctgggcatattatcctcaataatgccttcaaaatgatactcctcgtcattgacaatcggagccgatgagatgctgaacgtctcaggcctgatggccacctctccggctttagccgttcctgtcatcgtctgaaactgttccgatgttatctgattatagtttccaataaaacttgcggcaaagctgctgaccggcttcgtatagactgaaacgggatctcccgactgctcaatgcgcccttcgtggaacagattgatgacatccgacatgaccatggcctcatcctggtcatgggttacgaatattgcggtgagccccagcttctttgtaatctgcttgatgctgatttgcagggatttacgcagcttcgcgtcaatcgcactaagcggctcatccagaagcaggaccttaggttccatgacaatgctcctggcaagcgccactctctgctgctgcccgcccgaaaggctggccgggtgctgcttttctttcccgttcagctccaccatcttgattgctccggccaccttttctctgattgccgccggctccatctttttaagcttcagtccaaatgcaatattttcctccaccgtcatatttggaaacaggctgtactgctggaaaaccattccaatattccgctccttcggctccttgtccgtaatgtcctcgccgtccaggaaaatccggccgccgtttacctcttcaagtccggcaaggcatcgcaggagcgtactttttccgcagccggaaggccctaaaagcgtgacaaactgtcccttttctattttgaggtcaattccttttaaaacctggtttgaaccgtaaaatttttcgatatttctgaactcgatatacgccattgcaaatcctctcttctatatttatttccattattcatgagctttttcatccccgccttttccccgcaggaacacaaatccagatatcagaagagtcacacagaacagtacaataataatagcacaggtgcgctggctggatttcttcatcacatcatacagatacatctgggccgtagggaagtaattaccggccatcgtatttatgacaacaaaatcaccgaacacaatcgccatcgccagcatggccgacaccatgacgccgcttatgatattgggcaccacaatgtggaaaaatgcatagaacctgcctgccccagcatctgggccgcctctatcaggcgggaggcgttcatcccgttcagattgttcctgattccctggtatacatagggaagaacaacgatgcagtaggtagaggtcagcataaaaatacggttactgaatggttccggcgcatcggcatacagggccagcacactgattggaaggattacgccctgaatcgcatagggcatcgtacataatatcttcatatatttatccagccagggacaatataccaccacaacatacatcgccaggagaactgccagtgtacataagataatcggaagaatggaaatcacaattgtcctgccgattgacatccagaatgctccgtctgaaaatatttccgcatatgcgcggagtgtgaatccggttggcatcacatccatccattcgctgaacatggagtagataaaggtgaacagcaaggggatcatcaggtaaatgccaatcacacccagaataacgccggagcctcttttactttttttcattctttccccctcctcttttctgtgtcagcgactgggtaataagaatcgacagcgtcatcataagcatcagtacaaccgccagggcgcttccaaactgaggtctctgcaccacgtctcccgtgaactgttccgagatgcgaaccggaagaatggaaaagttattcatcagcagggcgtatgccgtcgcataggctgatacggcattggcgaatagtgtggaaaaggttccgagaatactcggcatcagcacaggaattcctactctgcgccagaataccgcgctgtttccccccatcaggctgaccgcctccttccactcattccggatagaatcgaaggaaggaattaacagcagggttgccagaggaatctggaagtaaacataagtcagcatcaggccccagactgtgtagagtggaaaatcagcaatggcgtcaattcccaggttccgtcccaggattgtgataaccccggcattgcccagcagaataatgaaggaaaatgccaggggaacgccggaaaaattggataccatgttcagaacactcataaaaatccgctttggcctgccccctttttcgcaggcggcgcgtcctcccacaaaagcaacggccaggccaatcacggccgaaacaaccgatatgataagactgtttttgatagccgtaagatacagcggtttactgaatacatttatgtaattttgcaatgtgaagccgggatctccgctctcaggcataaagcttttcacgataatagtgaataccggcaggatttcaaacattcctgccagtatcaagaacgggagcagagcggcgaaataagttcttttcttcacgcttttgttctccccatattattttgcataagcaatgacttcctcctgccaccgggttccaatctccttggtcgtcttatcccaggcttcctggtctttcaccatgcggctgttctcatactgctcgtccggcagcattttctcctttacctcctgaggaagctccacctctctcaccggccttgcatagccctttgccaggtttatctgtccttcatcgctcaatatgtattcacgggccatggccgcagcatgcggtctctgggaatatgcgttcaggatagtacaataaccgctctggatggaaccttccgacgggatattgatttcaaaatcagcgcctggattatttgctacaaactggtcacgatagccaagcgcattatagtcccacaggaacgcaacgcccacctcgcctttctcaatacgggccatggagaattctcccaggtcaagccttccctgctccgcaatctgccggaagaaatcgaggcccggctggatgttgctctcatcgccgcccatggcaatggctgctgccagcactgcgaactgcgcctggttagctgccgccacatcccccacagcgattttgtaatcgccttccagaaggtcggcaaatgatttcggcgcttcctccaccagcttcttgtttgtcatcatcgtcatggtgccatagtaaccgatgatccagtcaccatcgtcatctttcgcccaatccgggatagaatcccagtagcttgttttatattttaatgtaacgcctttttcctctgctatcggtccgaacgcctgtcccacatcaccgatatcctttgtggctttcttcttttcagattcaaacagggaaatctcttccgcggaggacatatccgtatctgtatgctcaagtccgtatactgtctttaaatcctcccatgtctctacccagttggcccaggtgtcaggcattcccacagaatccaccctgccttctttttgcgcttctttaagaatttcttccgtactcatactattcaaatccaccgcctctgcggatgcctgtccggaacatcccgccagggctccggcagctaaaactgctgccgtcagaatgctcaatcctctttttttcatatcatatctcctcttttttcttactttttgataatttggaagccgaataccgtccgctccaaagccggagcgcgccggtgtcaaggctcaggacccagtatacgcaaagattgtaaattccgttatcaaatttatgtaaagacttgggaaaaattaagtaaccattcagacagcgtgtaaaaagccgggtgcagcctccttttcagaagcggcacccggcccgggatatgagttcattcagtattacaatgatactattcaattttaaaatcttcagaatggaaattgctgtaaaatctcccctttacggcggtaaaccgaagaacgcaatagtccggatcggtcactcccaggggataatacatcgtgtcaccttcctgccagagcattttctttacttcagcgtcctccagcacttccatcgtgccggtaagcatagctccccggtaaaagcgtttgtcgcaaaaatagatacatgcctgcggattgcttttgtactgtctcacccgcatagaggatgtattcgtatgaaaataaaacactttaatgccttccctcttccgtggcgccagcatcgccttcgtattaggaaagccgtcctcatcgactgaactgataaaaaccacgctctgcctgtctgtcagtttgccgattgttgtcactgcgtctctcatcacatcttttcccctttccggaacgtggcttataccagtgcagcattgccttgcaccgcaatcacgccctgggtccattataatccgaagccgcacgataagtaaatcaggcacttttttgtaactataacagccccttttccttcaggaaatcctccctgtcatcctccagcatcatttcaatcccaatgctctgcatgatggagattgcgccgaatattctttttccccgttccgtcagaaaatactctgatttaagcggatagccgtcgtttgtcagctttccgatgactccgcactccagcagttcatttaaatgctgcaccagcattttctggctgattccccggatcgactttttaagcgcagataaagagctgccgcctttactgagctgccatattatgagcggcttccattttccttttattatatcgtgtgtcatctccagcggacatgtatactggctgcgcattttcatccggccacctccatttgtatagaacctttctcatatcattctctattcttaaattccccttatagctccactgcgcggaacccgcctccgggaaccagcgccagcgtatgggtgaatccgcactccgccgccagtctggccgcctcttcaaaacaacacccgatgttgtccgcatggtggctgtcggagttgatgataatccgcccgcccatgttatacagctcctttagcaaaatccggttcgggtacggcagcgtcctgtaccctctcgatatggcccccgtattaatctcaaagggaagtccctgatcgtttaattttttcatagcagcaagagccggctccagatattcatcccttgtctcgtcaaaatccctgccgccctcgttaaacttcgtcagtaagtcgaaatgtcctacccagtcgcaatgcgtcctgtcgtagacggtcgcctccaattcataataatcgcgggccagcgcataccagtctccattccacagacgcccgacggcctcggtcagtctctccctgctgtcgtcaatctctacgtactctccgttttttaaaacacagtgggtggagccgatggcatattccgctttctgcaccggcccgagacagtccagttcgattccgatataaaggttcatcttccccgcatattcttcccgaaggcggtacaactcctctttatactgtttcagcgcctgatccgtcatcccgaagttctccaggcagaatgaaaagtcggcatggccggaaatgccaaaatccgtaagcccctttctgtacgccgcttccaccatctccctgggcgtgctttttccgtcgcaataagttgtatgtgtatgaaaatctgctctcagcatagcctgttcctttcctgtttggattgaccggtttaaattgtccatagccgggaaagcgccgcgaatccagcggtattttccggcctgtaccccactactctagccgatcacaggccgtaattcaactacttttctaaagttttacccttgctttacctgcccttgttactgtttacagttcatctggaatgcacagttctgccaacagtaacctgctcttttcatcagaccgagttatcggagagtgatcagttcgagaagcgaccggagggggccgtcatatgtttttccctgtggcggatcacaagcagctcgtttttaagctccagtccctccgcctgcaccgtcaaaaggcgttcttccctcagttcattcccgacgagcagatccggcagtaccgtcaggcccagcccggcttcggcggccttgatcagtgcggtggaatttacactggtccaggacggatacgccgtatatccggccaggtacagggtactgtccaaagtgtcccgtattgcgctgcccttttccctcagcaaaagccgttctccgcaaaactcctccatggaaagcattttatccacaggcagataaccgggagcgcataagatatgcattttatatgaatcaaatgcctcgcacacaaaaggcccctgaggtacggcgccttcaatcagagcaaaatcggccttcccgcagcgaagtacttctaccgccgcagctgccggaactacctccaccgtcaccggaagccccggccagctcgcctcaaagctttgcaggattcccggaaggtaaaaagccgctatcgtgatgctggaaacaaggtggaccggtgcctttttttccagacttccaatcctggaatcgagggcatcacaggccgcaagaatcggcgtcacctcctccagaagcagtctgccgctctccgttatcctgatgctcttcgacagcctgtcaaacaggaccgttcccgccctctcctccaaatccctgacagcgtgggaaaccgccgactgtgtaatatagaggttcccggctgcctttgtaaaacttcctgtctccgccacctctttgaatattctgtactgccttacctccatattgcctcttcctccatattgccttttcccgtatcagatacgtgaatctgtgtatgcgtctatcatgaataaaagtaattgatatagcaaaattatatcattttacagatgagtatgcaaaggatataattgtgattatcacggccgaaagcttagagagtgtccgtaaattgcttgttactgttcacaggtagtatcccgcgaggtgttttttgtgagcggagcgcatcggaagtgaaccgtaacaattgctttccgtcagctgtgcgtcacactttgcgggagagtatcaataaaaaccagaaaggaaccatcatgcagaataatcctgttacccaacctgaaaagaagaatatttcaaagccgcatctttatttctggctcttttccattaatcttttcatcagcgcatttacattcggcggaggttatgtcgtcgtcccgatgatacgaaaatattttgtagaacaaaaaaagctgttcgatgaggatgagttaatgaatatggccgctgtcgcacagtcggtgccgggggcaatcgccattaatctgtctgccctggccggataccgttgcgccgggaccgcaggcgtcctcataagctgcctggcgtccatccttccccctatcgtgatcctgtcgttcatctcttcctggtatacatattttgccgccaatgcagtcattgccgctgttctgaaagggatgcaggccggggccgccgcccttatcgtcgatctggtgatcgatatgacaaatatgattataaaggagcgttcaccgttcctcaccctgatgataccggcttcttctgccgccggatttatttttcatatcaacgtggctgttattctggggatttgctgtatcctgtgcgtgttccgccttcttgcaaaagagcatctcaccagccgtcgggccgcaggaaaggctgatttatgaatctgctgctaaaccttttcaccgctttctttaaaatagggcttttcagcatcggcggcggctatgcagtcatcccaaatattcaggaacaggtagtgaccgcccggggctggatttcccagaaaattttcactgatattattacgatttcacagcttaccccggggcctttggctgtcaatacctccacctttgtaggcgtccggattgccggactgccgggcgctgtcctggctaccctgggctgcgtcatttccggcatctgcctgtcagtcaccctgtactgcctgttcggccggtataagaagtccctgtacgtgacagaaatactgaagggccttaaatcggcttccctcggtctggtcgtttccgcagcagtcaccatcctgctcttaacctttacgggaagctctgagctgaatctgcacccggatattgatacgggatccgtaattctttttctgttatccatgctgcttctgcgcagaaaaaagaccggtcccgtctttctgatgctcctgaccggggccgccggattgtttttgtaaatacgggctgttttttactccggctccatgttataatacttttttaaaaaataataaatggaatgcaaggattctgccctctgtgtcgtattactattgagcgctttaaatatatcaggaatttaaaaagcagcacaaacattgaaaacagatatcaggaggttaaaacatgaaaaaattgattcttacagggcttgcgtgcatcgccgcactcagcatgtcgataccggtgtttgcatcggagacccgcacttcccatcacagcgcaaattgcagcgaaagccgccgctgtaccgatgacagcaggggaaacgcctgtggttcccacagctggatggatgagaataatgacggtatctgcgattatttcacagatgatgacaaagacgggaactgtgattactgtaccggccaaggcacaaatgccggaaccggacgcggacaccaccagggaagaggcggacgccaccattattaattccggccggaaaggtgcttatatgcgcagcgaacaggatgccagacgtgtaatcgatttatactccgacatgatacgcaggatttgcctcctgcatttaaaaaatcaggctgatacggaggatgtgtttcaggaagtgtttctgaaatacatccttcattgtgatgtgtttgaaaatgccgagcatgaaaaggcatggtttatccgggtcacgctgaatgcctgcaaggattttttaaaaagcctgttccgccaccgcaccgtaccgctggatctgatttccgaggaaaccggcaacgtgatctctgagtattctgatatcctggaaacggtcctgtcattaccggataaatataaaaacgtaatctatttacattactacgaaggttatactgccaaagaaatcggccgcatattaaacaaaaaggaaaatacgatttattccctgttgtcaagaggccgggaactgttgaagcttgagttgggaggtgacggtattgagtaacagaataaaagatgcatttgaacagatccatgcaaccgaacagatgaaagacaccgcttattcctgtttgcagaagagaatagacggccgggcgaaacggcctttactccgtctgcgtccgctcgccgccgtctgccttctcctgtttctctttgccggttcaggaagctggtatctctggacaaagccggtatcctatttaagcgttgatatcaatccctccgtcgagctgtccctgaaccgttttaaccgcgtgaccagcgcagagggcaagaaccgggatggaatattgattttacaggatataacgctcaaaggcagaaattatatcgatgccgtggaacttctggtggaaagcgattccatgcaggcatatttgaaaaacgatccgtcgctgacctttacgattgcctcgccccgtgccggtgagcttctcgaggggctggaaaacagcgttgtctccaccgagtataagggaacatgcagacaggccgacatggaatctgtgcatatagcccatgagtgcggaatgtcactgggcaaataccaggcctatgtccgcctatccggatatgataaaaccgttacacaggaggaatgccggaagatgacgatgcaccagcttctggaccgtctgtccgagtatgaagatattgacggcggtaccccctgtgacgggcatcagggtgaaaacagccaccataaaaagggccgcgggcattgattagactgtatcggcaaaatgtttcagcttactgccatgtatccttgctgcgctcacacagttgtgttttgcgatgcacagccattcttcaaagaaatttaagttgtattttacccctttctgaaatacaatagaacagcatgtgtaaaggagaaaaggagaaaagagcttatggattttatcgaagtaataaaagccgtgattctgggcattattcagggaatcaccgaatggctcccaatcagcagtacgggacatcttatcttatttgacaacatctggccgatggcctccagccccgaatttttcgaagtgttcaaggtggtaatccagtttggctccatcctggccgttctggttctgttttttgataaactgaatccgttttcaccaaaaaaaggttacagagataaaaaagaaacctttgatttatggaaaaaggtggttgcaggatgtatccccatcgttatcgtgggtcttcctcttgatatgattctggaggattatttatcgggcgtctatgtcattgccgcaacactgattctatatggaatcgcttttattgtgattgagagcagggcctcggttccatcgatgaataccctgcaggatttaacttataaaacggctttttttatcggctgcttccaggttctcgccgcaattcccgggacctcgcgaagcggcgcaacgattctgggagccgtgcttttaggatgttcccgctatgtggcaagtgaattttccttcttcctggcagtaccggtcatggccggggccagcgggctcaagctgttgaaatacttcctcaaagaaggtatgttctcaggcccggaatggtttctgctgataatcggaaccctggtatccttcatcgtgtccatctttgcgatccggttgcttctgggctacatccgaaaccatgatttcaaggtgttcggtgtatacaggattatactcggtattgtcgtgattatatatttcacgtttcttgcctagagcgtgtttgcgtttatatagcttacccccatacagataaaaagcatatcccctcagcgataatggatccgcgctgcagggatgtgctttttattcgtttattattgtatggattgagatttcagctttccgctgcctccagtttcttcaggaactcttccgcaaagctctgtgccgcatcgaaccgttcatagaactgcccataaaatgcacgctccggcgaataaggcagcatataaaaaagcttcaggagatacatgctgatttcttttacggcgctgtcttccggcctctttctgaccgctgcccggagctgtttaagaaaataatgccagtcagagataaactgatcatactgttttacatccggcgtatcaatccatttacggaccttcaccttgccccggttctcccggcggcattcattgacctggagaaagtaccggaagcttccgttttcatagaaacggcccagcgggaaaagccggcagattccaggccggaacggatggataccgcaacgccctctttcatccagaaaaacgcattgctctttttcccccgccatcctgagattgggaagaatcaggccgtctgccagattgagctcgactccccctgccagaagcttttcaaaactttctccaagcccggctgtcaggcggtaaatatcaagcggatcgagaacaatcgatgttcccatccccctgcagcaggccgaacagccctcgcagtcccggcagtctgccttaaccatgtcatttaaaccataaagcctgccgtctgatatttcgtccatgctcacattgcgttccatcttatgtcaacccttccactctcttatctctttcaatcccggaaccagcacgcgggcgctggtctccagaataatccggcccttttcagccgtggcgccggaaggatccccgccgattccgatgggttttccatccttcgtcttccagtcctccgaaacccatccgatggaaacattgccatagggcttcagcgccttattatgttcaaatgcagacggtatccctgcctcagaaagctccagctttaccaggctctcgtccaccgccatcaccatggatgtttccatctcaccgccgtggaaatcccatatattgccctctgagatggtcgccgtcacatccgggtgggtgaacgctccggatgtgaggataaacggggatatccccagctcactcctcagctctctgcttaacacctggacaatcggggcattccccccgtggcagattagaaatgccagcttcttaaagccatgatgggcaaggctgatactgatgtcgtagagcatatgatagtaggtgtccggtttcaccgtaatggaaccgcagaaatttttgtgttccgtactgagccccaccggaatcacaggaaaaaccagcattggaaaatcatcttccccttcttcctccagggctttttgtatctccttcgtcatagcctcggctatgatatcgtccgtccccagcggggcctggctgccgtgctgctccagcgcgcccagcggaatcaggactatcgtttcttccttatctatctgttccatttcccatcttgtcagatccctgtaattgcgtatcatcgcctacaccaccttcggaacaattttagcagccagcagacggctgtacagtaaatgagccaccacactgttaaggccgattttcaggatgttaaacggaattgtcgccaggataataaatccattcaggttctgaattgccggatttacggccgccaccatcgtaattacctgatccaggggcaggttcatcgcctgtgcataaagaggaagggtgataaacgcattcgtaaagcaggcaaatgccgttctaatcggtatgctcaccagcagcgcttcgacagccgcccttttattggctcctctcttcttatataccagccagagtggtcccacaaacagaataattccaatcaggttagaaaactcacccacatacatggtattcgttccgaccgtaatcagttttatcaaaatcttaattacttccacacagatgcccgataccggccccatcaggaatacggccacgatggacggcacatcgctgaaatccactttgtaaaaaggcggcatcagcggtacggaaaattcaagcgacatcagcactccggccagcgccgccagcatacctgtgtaaattagtttctggacactccattttccatttgttttcgttctcatacttcatttctccttccggttctgtcagaattgcaaatttcttaaattctccgaaaaagagcctgctgccatagagatacggagcggtttttatttaacaactttcctgttaaataaagaaatcccaaatcacggggatttgggattggaattcgaatcgtatcagacaacattacatctgttttgaccacgtcaaaaagccgatgtatctaattgactctaatttcttctctcatccagactatactgtcggttttggaatttcaccaaatcaaccgtttaaaacgggtcgcggactataaccgccggtagggacttgcaccctgccccgaagaacttattcaacttgtgatttaaaaatagcacaaattcctattattgtcaatagggaattactttgtctggatgtatgattccaaatggaccggatttttacgcatggccgaatcgaaaggcccggcgggccggttacaatccgcattttattatacatttttttactttcacagatgaaagccaaataatgtgaatcaggttaaaatttgtatatttaccctaagataaatatgccatatagtcaaattagttacttcaattgccgctaaggcaaaactatcaaggaggaagaaatcatgaagaagcattacacacccatcatcctgacggcgctggccctgactctgggactgtctgtcagcgctgccgctgccgggccggcttccacggctcccgacgacctggattcttatctgctggcccataccacggtcagtgacggcgcccgatcactcccaatcgatcgcagcgaagtcaatgagcatgccattacaggctattatacttacacattccaggacggtgacgccgccggccgtaccttcaagctctatgccggacgccacgcggccctgcgcgcttatatcaccgtgattgccgttccggacggaacgggcgatacctatgaatttttagaggaacagggatggctcgagcaggctgatacatacggtgaattactgttcgtcctggagcccgcaaatggaagctggaaaaccccggaggaggagtccgcctatctcaaagcctgcctgggggaaagcatcggaaacactgcttttgattcgcgttcaacaagcccgggaggcatcgtacagaacggaagggttccggtcagtgacggcacctcctgccccgtttttaccggacactcctgcaattactatgtcggctacggcgaaggctgcgccgtcctggaatcctggacttccggcaatccactctatgtcatcagccaggcctttataggcggcgggagcacaggcgcggatcgtttacagcgttcggctgcccgcacctataacggaataaataccggctcttattaccccggttttgatgacgcgtccttttcggctaccctcagggctatgaaaaaagacggagtggtaagcagcagtagctttatcaccaacgccgatatcccggtacccacgctgtttgccggttatgcagccgacgacgccagcattccctattggataagcgtaaatgatgccgttcccgtatccggtaaacagggtttattccgtcagaacatccattctgatgcatggcagacggtttacgccaatcagaacgcgaaaaactgggatcccggcacgccttacggcatttccagggttcaggtgtcggaagacggcagcatgactgcgtcccagattcgtgatttccttgccgattatacaagatataccaatccctttgcctacagcaataatctggcctaccgtctggattattacaaagccaccgaagcagcccgtatatctgccggaaaaaacagggcctccacagcgtattccttcaggggccacgacggaaatgaggccatggttgagcttcgcgccctggaatccacccgtgtttctgctcccggctgcagcaccgagggcaccgtttattcctgtatttccgcttttggcgattacaatgacgacggagtcctggatccgagggaatccctggtctatgtacctgacagcgccaaaaatgccggtcccgacggcgctcccgtcgtagttgtcttccccggcagcacgcaggccgcctccacttttatggattgttccggatggtgggccgtggcaaatgacgaaggatgcgtggtcattatcgtgggccagttctgccgtaccagcgccgccagcctaacctacggcgacgagggcgacagcgccgactttgcccgttcaagcctcgttctgcttgatcaggtgatcagccggcaggcaggtgttacaccggacttcacccgtgtctatggcagcggccactcactcggcagcaataccattcagacgctttgcaataatactgaggcctattactttgcagccgtagcctcaacctccttcccgaacccggagtttaccgcaccgcagatgccctgttatctcatcgtgggccagtccgatatcagtgaaccgcttccggacccaagagccagagatctggtaaaggctccctgggatacctcggccgacagcgccatttataactgggtttcaggagcgcaggcaatgaacggcttggtcaaaccatttgtacccaacagccataaaagctttctggccgcctgctcaagctataacgaaagcggccggtattacacctacacctggaataacagcgccgacattcccctggtccggttcaccagaaccctggcccgggaacacaactgttacccggaggaattccggatggcctgggatttcctggaacactacaggctggctccggacggaacacgcagttacagcgcatccgcctttgaatccgccgattctgtgttaatcgttaaataataaaaaagctcaggaaaatcaatgcgtttttatccgctattgaatttcctgagcttttataagtttaacgggcgtatgttccttgctgtcctgcttatgcctcttcaatactgtggctgggatttgctttattggctgccaccggatatccgttgccctgaatgtccgtgcatatttcattcaaatgatatttctcgtcagttctcatttctccgtccgttgtccctgcttcataagctccgtaggggatcgaattgatagccaccttgtctttcggtttctgcataatttacctccatgttatgatttttgttttagtataaccattacgggccggattatgaggccgctcatgcatatcacgcaccgcattaaggaatactattaagagaaataccgctactgttcaaagcacgtcaacccaaaaaccacttcagaaaggaaggatgaaatatggacacggatatgtcaacaaaaaacgataccattcgtcttgccggccactgtgacgccggttgtaaaatggcaattgacagcatggatcaaatcagccgctatgtaaccgatgataatcttagaaacgttataagctccagtaaaaacaggcacaaggatttggaacaggaggcctccggcctgctgaacaagtacggcagaaacgaacaggacccccagaaaatggcttccgccttttcctggctcagcactgaaatgaaaatgatgtttaaggacgacaataaccagattgccaaaatcatgatgaacggctgcaatatgggaatccagtccatcagcgaggatattaataaatattccaatgcctcaagcgagagcgtttcccttgctaaaaagcttgtaaaagcggaggaaaactttatgcgggatttggagcgctttctttagtttagccccctgcggcctgcgaaaagtaatatataatcaggaaatcctgaatatataataattaagagacaaagacagcaggaataatatgcagatatataccgtaaaacagggtgatacaatagaccgtatcgcaggcgcagccggcatggatccgctgcgccttgctcatgataatcaaatagaacctccataccggctggcagtgggcagtcacttctggttgctggcggtgacagcgaagaggcaggcgtcaggctgggcggcttctgcattggcaatgtccaaaccggtcccgtcctgatgaatggctatgcatacccctggattgatgagcaaattctttccgaaacctgcatgtacctgaccagtatctctattttctcttacggttttacggaggcaggagaactggtcccccctgcgggccacggcgaagaagacatactgcgcgaagccaggcgtcaggccgttatcccggttctggtccttacaccgctgggagcagacggccggtttaataacaatctggtggcggttcttgtacgggatctggaaattcagcaaaagctgatacgtgagctttggactgttgtccaggaaaaaggttatggtgaagtcgatgttgactttgaatatgtcctggccgaggacagggagttatacgctgatttcgtccggcgcctgagaattattatgaatcttttcggaatcagagttaccgtagctcttgctccaaaaacttcgagagagcaaaggggcttttatatgaggggattgattacagggctctgggagaagccgccaacggcgttttgctgatgacatatgagtggggatatacatacggccctccgatggcagtcgctccgattaatatggtacggagagtcgtggaatatgcgctgaccgagataccggccgaaaaaataagtctgggaattcccaattacggatatgactggccgcttccttatgagcagggcgttacaaaagccagaagtctgggttacagagaagccgttcagcttgcaatcgaccatggagtaccgatctactttgatgaaacggcccagtctccacatctgcgctactggcaatacggcatccagcatgaagtctggtttgaggatgtcagaagcatgtatgccaaatttgagctgataaaagaatataacctggcaggagccggatactggcagttaatgcggctcttcagggccaactggcttctggccgatcatatgtttttaattaagcggggagaggccgttatttaaactgtgaatacttgttaattcgtatctcctgttgtacaattaattggataacgataacctgcatgctccgtgcacaggtcaccgccttcaatcagatacaaataaaatccgtgacgtcaaatatcacggattttatctgttttataatagtcttaataagtgtcaagcggcggttttacggaatccggcagcggacaggtgtatttcccgccgtttctctttttcacttccgttttggccgcttctattacatccgggcgatccatcgtcctgaccgatgccagcgccatcaccttggcagccgtcagaagtcccttatgggcaatcgggctgcatgactgagccgtcatctgccatgtatgacccacatttccaatacagcaggtcgccacattgatgttcagggtcggtacggcatatcccacgtctcccacatcggtggaaccggcttccagcttaatttttgacggatcaaaggaatgaatctcactgtcgagaggattttccagaatttcctcaagtctgtcctctccgtacttatcaattatttccttccgtatcattgtttttgtctgttcgttataggtgttgaggaactccctggccagccggtagtcctcgcctgtccagtccggagcgcctatttcctgcatacactcatctgccacagatgccagagccatattgggaatatattcggtaaatgccatcgccagttcgcattccaccgtcgttccggccatcatggctgcccctttcgccacatttacgacacgttcgtaaagctccttcacctgtgacacatagggcgctctcacctcataacgcaccgttgcatgatcctggaccacattgggagctgttcctcccgcatcgatataagcatagtgaattctggcttccggaattatatgttctctcagataattgcagcccacgctcataagctccacgctgtccagggcgcttctgcccagatagggagtcgctcccgcatgggatgtcagtcctttaaaataaaagttggctcccataattgcattgctgtgcatcggatccacctggttggccgtagaaggatgccatgtgtatacaaaatccacatcgtcaaacatccccgcacgggccatgaactgtttcgatccggccccttcctcggcagggcagccaaaatagataatggtgccgtctttacggaactcttccagatatttcttaaccgctatcgcagcggccagagcgccggttccaagggcacaatgaccgcagccatggcccggcgcaccttccattaattccttctttaccggaacggcagcctcctggctgagtcctgaaagcgcgtcatactccccgagaattcccatcaccggtcttcctgagccaaacgaaaatgttcccgtaaaacaggttggaattcccgccagtcccgtctctacggtaaaaccggattcctccagcagtccgcagagcagcccggccgatttatcttcgtggaacggcagctctgcaaattcccaaatgcggtcattggccgccagtatccgctctgcctcttcttccactgctctctcaattaattcaatatccgtcaactgtcatacctcctttgccaccggtaaaacgtcagcatgaactttcgccttttttcattatattacagtactttaccaagaaattcaatggttctcgggtttttagcattgccgaatatctcatccggcgtaccctgttcctgaatgataccgttatcaatgaaaaatacacggtcactgacctccctggcaaatcccatttcatgggtcacaatgacgattgtcatgccggactcagtcagggatttgattacattaaggacttcctttaccatttccgggtcaagggccgatgtcggctcgtcaaaaagcatcatatccggctccatcgcaagagcccgcacaatcgccagcctctgcttctgccctccggaaagcttgccgggatagacatccattttgtccaaaagtcccacccgatccaaaagctcacacgcctttttttccgcctcggcctttggaacctttttctccagcaccggagtgatggtgatattatcgattacctttaaatgaggaaatacattaaagctctggaacaccattcccatcttctgacggaatttgtcaatattgacggaggcatccgtgatgtcggttcccctgaataataccttgcctgaggttggcttttcgagacagttaagacatctcaaaaatgtacttttccctccgccgctggggccgattaccgaaaccacctcaccttcgtagatacattccgtaattcccctcagtacctctaaatctccgaaggattttttcaggttctccacacagataatcggttcagctttcccgccccggcctgcatcctgcgataatactctgtcattgcatttaccgttcattcctgttcatcctccattccgcatattccatgatttttcctaaaaccgtagttaccatcaggtaaatgatacccgctatcatcagcgcctccacggggcggaatgtcgccgatgatatggttttatacgatgtggtaagctcgttgataaagaatacggaggcaagggatgcctgtttgatcatggtgatgaactcattgcccagtgcgggcagtatatttttaattgcctgcggcaggattatctgcgtcattgtatggctgcctgtcattccaaggctccgcgccgcctccgtctggcctttatccaccgcctgtatcccggctctgattacctctgccacataagagctggcattgataataagcgctatgataatacaggaactgtccgatattttcaccggcagcaccctgggtaaaaaaatccagaagaaatacaattgaagcagtatcggcgtgcctctcagcacccagatataaaaacgcacaaaccactgaaatggtttcacgcgtgaaagccgcataatggccaaaatcattcctatcaatgtgccgaagaatactgtaattgcagcaaggcacagtgtgccggtaaggccctgtaaatatacaaagccgtaccggtcccacatttttatcattgtctctatcatttccgaagtcctcccgccttaaatcagcccgttacaggccgagactccgggcatattccttgtactcttcgtaccaggacgcatacgtaccctcttttacaacttcatcaatgatttcattgaccttctgcaaaagttccgtttcaccctttgtgataccgattcttgtcccctgtgtggactcatccacggtaaacgagaaatcgggcacaatcgtcatgccgcagccgtcgttcgcatcaagatacagctctgctgtcgtcttggcggtgataacggcgtccgcttttccttcctgaaccatcaggaaaccgtccgttgtagcagagacgcgtttcagctctttatacgccggaacctgttcgtttgcaaacatctcctgtaaagaaccgctctggacaaccagtgtcttgtcagccagatcctccgcactcttaatcttatccaaattctccgttcgcaccataagcccgtactgtactttctcatcgtcaaaataatatcccttggatagttccatggcctctgctctggcgggagtgtaggcgagggctgaaatagccaggtcatatttgccgtctgaaataccgcttagtacggattcaaaatccagagggacaatacggcactcgacacccagtttctccgctatatatctggcgagttcaatatcggcgccgacgtacttgccgtccccctgcttggaaggatctatgaactcattcggcgcaaaatacggctctgtcgcaacttcgatgtaaccgcgctcgagaatatcggcaagcctgccgccggatgcagaatcagaatgggcggcttcagagctttctgaacccggtacggcggctgatgacccgtctgtatcatgatgcagagaactctcctcacttactactgtcggcgcctggcttaacgcagaacaggcactgagcattgtcgtggacagtaaagcggcggctacggaagcggccagctttttcatttgattctttctcatgtttccttcctcctatcataatattttagcctgtggtgcatcttcagaattttaagcccgcgcttgtgcggcagtccggagagtaatcatagttcttccggaatgttgctttagtctgctaccatgctaatgcatgaaattatatccgtgacaacgccggctgtcaagtattttttactgtacaaaaattcattttttgtctgtatacattgattttaaaggaaaaaacggcataagtttatattttaaaacaggagcttaacgggacaacgcaggggaacggcagccgtgtttacttcccgggcggcaaaacaggcaggttcctccacaatgccggaacctgcctgtctcgatggtaaaatcgttaatttttaattgtcattcacgctctcccatcgtaatgattctgcttcacaattacttattccccttctatgtagttcaaaatattccccgatctctattcgggcgatactatcattctattcatgaaagagaacaattattccatcacctttattttctaatcctgcgtttcctgtcatagatcatcagaaggcagccccataccagcagtccggaaacggcagtgcctgcagccgcatagaatattcctccaaaaaaagaaggataacgccccgacaaagcggtaagcgcaattgaggtcagattcgcgcagacgtgcagccatatggccggaaccagtccgtcaaaatgctcataaacaaccgccagcacaagccccattaaaaatccgtagaccgcctgaaccagattgccatggtacaaggcaaatagaagcgatgacagaatggcggccggtataatccccatcacgccgcgcagcctgccgtatcccattcccctgaaaattaattcctccacaacgggagccgcaaaacccaccgccagtatctgaagccagacggagacgccgaatatgctggcgctcacctcatcgaatgcctctgaaacataagcgataccgcttatctcaatcaggttgttcagaaaaacgcaaagggctgccgccaatacaaaaagcagcgcggccccggttccaatatccagacgtacccgccaggaaggaccgtaatgacggccttccgtctgcctcctcctgctgtaaaaataatacagaaccccggatgtcaggatagctgaaatcagcagaatccacattacatccagtctggctccgaccagcaaggccatcactgttgttacaaaactatagagcagaatcggccatatcacctgccatactactgaagccgctccaaaatttcttccagtcatttttttactcctttgtcacagttgtaagatgcatcaattgtagcatggacgcagatgaaagtctattcatggtttccagaaccgctcacagcccctatgcccgcgtaaacagaaacggcagagccgttcccttactcggaaacagtctctgccgcgttcattctgccggacagatattcaaatacgctgtagaataccaccgccagagcaataccgattatgtttgccaaatacctgtgcatcacagccccgccggccccatagaggcctgccgccacggcaagagcgccgaaagaattgaaaaccgtctgccacccataggttgcacagaatcctacacagattccgccggcgatccccagcatcccgtagctcccttccggtaacacccggcacagcaggagaaacagcaggcctcccgctatggtacccggcagcctgtgttttacgcgctgctttaaatcttctgcaaatggctgcatgaccgacatggccgcaaagcccgcccacatcggccggggaagccccagttcccgtgaaacaagcatgacgagagccacgccgagcgtaatgcaaagctgccatttagttctggacgatgtgagataaaattcccgaaaaaggtcagaaagccgtcttttataggtgattttataatgattgcggtaaaaaatcagggccgtcagcagaccgccggccataagtcccaaaatccgcgtaccatatgctccgcccgacacatcattgcctgacagaagcagataccccaacacaaaagttgcatggtttgacatcagaatattatgacatccaaagaatgtaagcgcgaaaatacagataaaatccacagcaaatgccgtgatcggagaagatacagccgcaatatggggcccgactgaaagtatcccgaaaattcccagcaggacaaagaagctctgctttgaatcaattcccaaatccgcctgcctgaagaccatgactgccagcagcaccacgactcccgcgatactgttttccggcccgaacagggcggtaaatgccgaaataaaagccacgcagaacgccatggtcaaaaataccttcaggatatagacgccaatatgcctctgcttctctctgcggttcccggcatttttgataagcgcctttgaacctgcctggtttaattgtaattcctgatataatgtcaaataaaatcccgtcctttcaatctaaacaaactacttctgccgtaacagttaagacagcatgaacagttaccttctgcctccgctctcatccgtcccgtcagcctgtgactgctgtttttcacccgatatccggttgcactcgcaaagcagcccggccagcaggccaaacttctcttcacccatctgtgtcctgagcaggtataccggttccaggtaatacgcataggttcccttcagttcccggctgccaagctctgtaatccgtaaaaagtaacttcgtttatccgcctcgctgacttccttttccaagaaccccttcatctccagattttcaatcagcctgctggcgagaggcctgctgattcccattttttcacatagagaatgcggggtcagaggattttccgataaatgcagcctcgacagaagatccagttcctgagctgaggaaattccgcctttcggactgcgcttcacatgcaggctgcagaactgcctgatatcctgcatgattttcatcatttccatccaatccttcttttctgctgccttttccataccctctccactcaccgcatgccgccccgggcagactcacatttaccgtatttcatcaacagatgccccggacaaaccgggcgtttagacccgcgcagtgcaaatatagtttactttgttaataaatagggattatactccttttaatttactttgtcaattatttccagccagacttttcattgtcacagccgggcagagcttattattttaccggcggccgccagaccatcgcgttatacagaggggccagtaattcgaaataataaacgacggcatcagcaattgtatccgatgtcttcaatgtctcatcgtctgcttcaaaaaacagtctcaaatacgactcgcacccatcgtgatcctttttcagaaaatcgcagaagtcctccggttcttcgttgtcgatgtcaaagctgtcatattctgaaaggccttcattgcaaatctcccatgtcatatgatggccctgcagctttcttatttcctcagtaatggattgccgaagttgcggcattctatccttaatgtgcatccgatccacagcgtcatggcgcactgccaaaaaaagattgacctcaaacccgcccggtacgatacaaaattgcaggcagccgtgtttctggaagcccttgatctcatccctgtcccgctgttccaggcactgattcaacaggtcaatctcttttttcttcttgccgtagcgcacgcccatccatgcgaccttaaatttattgaactcgcacggcctggtcatggacgtaatatggtccgggttccaatggcactcgacacccagcttccgggcctcaggataaatttttttgtggagaagaagcattttactctggatatcttttcgccgcttatcgatttcgatatcgcttcgtctttgatttcgtataaaaaatgcttcgtaatccctgtatgtaaaaaaatacccgtctaacaggtaagtgtcctcgtcaaattcgtcatcctgccggataaagcccttcagcttcttcttaagctctctctgggaacgccgcagctcttctatagtctcccgggcctcctcataataggcgatgacttcctgcgtcacttccacggatttgtgttcgcagtacctgaaaaaccggtcaaaccgttctaaccgcacatccgttttatccatctcttcaatatggtcaaattcaatattcttcgtaagtccacccgccgtaaaattagatgaaccgtaaataatcttgctcgtttcgcctttcaaccagtaaacctttgcatgaaaacgatagtcaaaaaacaccctgacatccgctattttcgtcagttgcctcaatagctcatcgggcttgtcctgtgaaaattcatccgacaggtatatatggattttggatcgtttcaaattgtttttctctaccaagtctctcaaaatccgcagtccctctgcggaaaagaatgccgttccgatataaatctccctgattccgccaaaggaaagaaattccttctccaaagaggttgcagatacggtttcgctccaatagtacattggccccctcctatgtattccgttccattcaaattccttcccgctcaaatttctttctcagctccagcgcttcggcaagtgaatttttccatccgtattttttcaaatccaccctgttttccgccgaaaccgctacgccctcctccgtcaacaaaagccgctgcatttccgggtactcaaaataagccgctcccgacagaaagccgctgctgttcaccagccgccatgctggaatcccgctttccacacggccgtggctcagcgcataccccacctgccttgcattgcgcggcttgccgcagagcattgctatctgaccgtatgtagcgacttttccatatggtattatatgacagaccttctccatccgcttataaaaatccatgcagcacctcctgtcggcctatccatccgttctgttctgataagccgtctctgcatcttcgtacgcctgtctcgttgctgcgtcaaaacataccattgtaacgtccatctgagggtactgatggattgtcctgactgcaattgcagccgcttctgagaccgggaaccggtaaatgccggtgctgatggacggaaatgcaatttcatggatattgtgttttaatgccagctcaagacagctcctgtaacatgattccagaagttcgcgttcgttatgagcgccgtcctgccataccggccccggcgtatggataatatactccgccttcaatttgtatccttttgtgattttggcctgtccagtcttgcatccgcggagcatccggcattctcccagaagttccggcccggccgcccggtggatggccccgtccacgccgcctccgccaagaagggatgtattcgctgcatttacaattgctgtagtctcacatttcgttatatcacctgtgattattttaaaagacatttttctcctttccaggggcttctgcactcgggacaatttcatttctcccggttttactgtctttctccttcatttgcctcctcgacaaccagttcttccggcggcgcctcctcgataaatgtgacatgcagaaccgcctggggccagttcagcccggtccgtgcgtgttttcccttctgcctggccgtcccctccaaaagctttaaaagttctgataacacctcccgcgtgaggtatcctccgcgccagtggaacagcagtggtttccccttccttattgcctggagggcgcgtttttgcacatcctctgtttttgtgaatgacaatttcttttcccggtaataaaatttctctccgtcactgcactgagggactttgtagattaccggctcatgatcgcggaatatctgtttgtcatccaggttaaaatagtcgtatcttaccatatcaccgtcgcttagcgtattatcaaatgtggcatccaaatgataatacatgcctcctgatttaatgacgttccatgcgtggcggtacttgatatttttatccggattggaatctgaaatcgcgatcatacaccagattcccagattatcgcagaggattttgacggttttggcaattccttcgcaaaccccgactccttgtcccagcgggccgattatctcatgggagtagggctttttcagcttatcgtaatggacatgggtgcagataaaatcgtgaatgtactgttctttgtcacgttccgcaagtgactgcgccggccggcacagcttttccacacgcgccttcatcgccttttgatgctctttaatcttacctttttcaaacaggtattccggtatcatctccacattgccggaatccggaaaaaaccggtagtgaaaacccacggcataaaagatctccgggcagtcgagtctcagtttaaagaaaatatcactcagctcatgattctccagccgcggtaccggaaatgagggagccaaagagaccaggccggttttcatggcgtggtaggctgtccgttgtgctttgctcatttggttgtaatagtatggttccatgaatcctcctgcggcctttattctctcagtgcttattccggctccggcccggaatcctgttctctctttaacactgtctcaaacactccctgatcccaattcgttttcttcaggatttcaaaaatgctttctaacgtggtctcaagtttcatctttttatccgtaaaaatatggttttcacctctcggttttccccatacatccacaaattgccgcactctctgatagatgtactcctcaacctcatttatggtgctgcctatctccgtattatagcagcttttagatacacggtttggattccattcatccgtatcggccgccagatagcgattctccgaccttaatttcgtatttatcgtaccagacactgatcccaaggcgctgtaaatctctcgccaatttttctacaaatggtttgtctatgcttgtatggctaagaaatatggtgggcataaagacctcctctttcgtatgaaaacggttaccgtcagtcctgtatctccgccataaattgactgactgcctgtttaatcgtcatgcatggcaggccctgctttttaatgccgttttcttcaatgttgacaacatggaaaacatagtcattcaccggtacataatccatctctatcaggacattgtcctccacatcctgaagcagcacaatggttgtctgggtgctgttaatgaatttctgcacatcggataaatatcttgaacagtccttttcccgtgcaaaggcctctgtcagcttattcagtttttcttccctgtctttggatgtacatttcgtgtaggtccacatagtattccctcctgttaatttgcatcattgagtcaaaatctatcttatatctactgtctgattacaattcccgccttattttatcgagcaattccatgtcagccggaagccatgatatacaactcagttcttcctttcccaaccattttgcctcatcatgttctagtaattccagcgttccttttataatactacaccagtagcatttcattgataaatgaaaagtagggtaatcatattctataacatcaatcaaatccccgacctcgatatccgtgttcaattcctcacgaatctcacgttttaatgcctctttagctccttcaccaggctcaatctttccaccaggaaattcccaaccgcccttaaattcaccgtaaccacgctgtgttgcaaatactttgtcatttcttttaatcactgctgctactacgtttactgccatcattgtttcctttatctcttataaataagttttttgggatgtgttaggttgttttatgtaaactgttttcgtatgccaacaaacgttttaatttctctgcatttttattcgctattatttcaagaacaagcctgtctttttcatcatctaaaacatgaaactttctatgacaattagggcagacagcaactacattatcaattgtatcgctccccccatctgcgagtcgtttcacatggtgctcttctaaatatggttcattatttttatcaatgaatggagcttctgaaccgcaacactggcactggccatttgcaaggcgtttaactagttcttttaaatatggatccctataatatactatcgtttccgttgtctttgattctttattgtcaggattgtttttcaatcgattatttaattctacatatgaaagctttctaacttccttttcaaaatcatctgactcactttgatttgtattgaaaacaggttttataggaaaaatccagacatttctcatttttcccgaactgtctttttgtttgtcttgatatgggacatcggcaagctttactatccctttataagtatatcttgctttttcaagcacttcaaataaatgtaactctacaccattctcattagaattatacagagtacgattttgatttccatctaaaatttgatccccaatctttcccatacctgtatagtataaaattccatttttccatacatcactgtagaagcctttggtatgatcggaaactataacaagagtgcccgtttgctttgaacgtcgcattcctcccatatttccacatttatataactgacgcaattcattattagacaattctgcccctatactgattcccggatcaaatcccattgcagccctccatttatccagtatctatctactccaattgtgttactaaaattataacatagaactttaagcttggcgacttcataaaaagagcaatgtatttctttttattatagtgtattggctataaaaaacactatatcaaaagtaaaaacattgctctttttatgaagtcatcagtcaaaccacgaatgcccgtctcgacctaaaagcgcatctgccgcctcaggcccagcgctgccctgctcataaatatgcacgggaagtcccatttcacggtatttctcccgcacctcgtccacgtagttccagcttgtctcaacctgatcccactgtgaaaaccaggaacgctccccacgcatgcaggcgccgagcaagcgttcataggcttccggcgtattcatccgatttacataagaacagctctggcagaaatccattttcgcctgtataatttcctccgtctcacccggcttcttaatattaaactgaagatatacgccttccgtaggctgaatcttaatattcaggatatttgactctaatccgggagccgggcttttaaatacaaccgccacctgcatttcccgtctacccagttttttaccggtgcgcacatagaagggcatgcctctccacctgtcattatcaaccgacagcttcagtgcggcgtaggtctcagtcgaagaatttctgtcaacggagggctcttcacggtatccgccgtattggcccagtaccatactttgtgaaatatcctccggtacctggagcgccctgagtacttttatctgttcacggtgcatatcctctacggccaggctgccgggctgctccatcgccacaatggtgagaatctgaaacaggtggttctgtaccatgtccttaagagcgccgctgtggtcataataaccgcctctcgtctcgaccccgacctcttccattgccgaaatctgaatgcactctatatgctctgcatcccagacattactgaaaattggatttgcaaaacggataatctgaatattccgcaccatctctttcccaagataatgatcaatccggtaaatatgatccggcttaaaaaatgattccatcgtcctattcagcttagccgccgaggataagtcttctccaaaaggtttttccagaactacctttccatgctctgctccggccacactttttaaaccatttacgattgtgctgaaatatctgggggcaacggcaaaataaaatatgtgatttccggcccccatttttttatagaaactatccagtcccccatactccttttcatctgtaaaatccatacggtaatatagaatacgttccgcaagcttttggtaggtctcgtctttgaagtgcagccttgcaaatttctccacccactctctggccatggtacggtatgtctcactggtgtagtcccgtcttccgattaccaccacccggggacaaaatactttgtcatccgaggcctcaatattataaagagccgggagaagcttcctgaaggtcaggtctccggttccgccaaagattgtaaatatctgctttttattcatgctcaaacctccaatcatggtggaaaatgccgtccctatctgtccgctcatacgtatgcgctccaaaacagtccctctgggcctgaatcaggtttgcgcctaccggtgtcccccggaacgcgtctatataggagattgcctggctcatgaccggaacagggattccgttttgaattcccgttgccaggatacttctcaggctgtcctgtccatggttgatcccgtctctaaagaacgagtccagcatcaggttgggtagttccctgttatttgtgaacgcttttgttatatcatctaaaaattcggcctgtatgatacatcccgccctgaaaatggaagctatctttccgtagtctaaatcccagccatattcagaagaagcatgggaaagtaaatcgaagccctgcgcatatgcggctattttagctgtataaagtccttttcccactttttcctgaaaagcggctttgtccggcaccagattctgcattggccccgcaaatagttctcttgccgcatttctttcactgatacggtttgacatgattctcgcattgcaggctgccgtaatcatggaaacatttatgccttgtttcagtgattctaaactggtccatcttcccgttcccttctgcccggcactgtccaaaatatagtcaaccagctctccgtctgtaaaatcatccttttcacggaaaatgcctgctgtaattcctatcaggtaactctttaattcacctttattccattctgtaaatacgtcggccagctccctgtttgtaaatccgccggcatatttaagaagcagatacgcctctgcaattaactgcatatctgcgtattcaattccattatggaccattttcacataatgtcccgctccgtccggccccatataggcacaacatggttctccctgcgcttttgctgcaatttcttccagaatcggcgcaatatgctcataggcctttttatcaccgcccggcattatggatgggccaaaacgggctcccatttcaccgccggaaactccggtgccgaaataataaattcctttttccttcagctctttttcccgtcttcttgtatcctcaaaaaatgaatttccgccgtccaggatcatgtcgccttcatcaagcaagggaagaagctggtctatcaccatatctaccggttttcccgctttgaccattatcaggaactttcggggtctctcctgggaatccacaagctctttcagatcataaaacgggatgagattttcatgggatgttccctcatcagcgtttctgtcacctcacggcttcgattgtatcctcctactttaaatccgtgatccgccatattcagggcaagactcctgcccataactgcaagtccgatgatacctatctgcgttgttggtatttgcatttttattacctcctctgtgttaatgctgctgagtattgttgcaaaatgtcaatgatacgccctccggcatggggacggaatccagaagtcctttcagtaatccgcttgttctatccctacctatacttacgataccgcccgcaaaacggttggctgccaataaaaagttttcatccgggcttaagataaaatcgcggggatgaactcctccgcaggagctatgctgaatgacagcggctttttcaccctgtacattgataacagccaggatatcgaacccccgtatggaaatgtatagaaatttctcatctgaggtgaggcggattgctgctgccgcaggttctgcttttttaaccgattctctttcttttttgcttaccccatccgcactcgccaaatgtgaggcttccggaagtacagacaaggtctgctctaacttaaattgatttttatttacattgaatatgaatagttcattactcaattcacttaccacgtatagtttagtatgtgctctgttaaacacgccatgcctgggtccgctgccctttggaaataatatctcgcctgccggattatatccgttttctttatcaaacagacggattttattttgttcaaggcagggaaccaatatatatggctcatgtaatataatctgatggcagcccgccctgtccccattttctatcctctttatcagggaaggaacccctttttccaaatgatacaccatgacatttccttcatgatagttggccgtataaacagagctgctatcctgcagaatataacagggtgtttgcttctcttcaagaatttcttccacatggtctatttccttctcttttagagtcaggaaacaggttcctgcctttccttgcttttctatgggaaaagccatggagtccctttgcaggctgatccattttgcattgggagcctcgtaaaataattccggctgtgacatgattccggtatccggagagactgtaaaatggtatacgcctttgctgttatcggaattgtaggttccgatataaacgtctaacggataggagtagtcagttggatgattgttgagttttgtcgtgttttctatgttagttttttgagtgggtatgatatcattattcgtatttttgcttatctccgggttttggctatcgtctggtttcggattaggttctgtgttggattttaagtttactaccatttttatataccttctttcctgagcatatctttattatggccttcgactatttatcttcataaataatgtggtattgcaattattagatgggatttccctttaaataatgcatatattattgatggataagtgggttctgatacttctttgtgtgttagttatattattattaggaaatatatgttctgctttctttactgtaagtataattgttacagtttaaaaagtcaatcattattttgaattagttttggtgggggaattgatatggctttgatagcgtcatcgaacagactaagtgaagcaaatctaaattaagcgattttatttacaaggtctataaaaaagtatattccacctgtaaaatttaaatccataaggctctcgcgtgcctcgacagatttgcggatcgacgtaccagatgaatttataatttcaatccacaaggctctcacgagcctcgacatggtcagatttttatcacgagaatggggcgaaaatttcaatccacaaggctctcgcgagcctcgacggaaggagattgcgatatgtaccatacatacggaatttcaatccacaaggctctcgcgagcctcgactccacctactgattctgacttaaagcggaggttttatttcaatccacaaggctctcgcgagcctcgaccgtcaaaatacgttgaaaagtcaacgcttgaaaatttcaatccacaaggctctcgcgagcctcgactccctgtgttttccaggatgtctcctaacggataatttcaatccacaaggctctcgcgagcctcgacgttgctaaataaaccatacggcgatataggcggtatttcaatccacaaggctctcgcgagcctcgacttaaaatctaccgttgaaaatgaacttgaatgtatttcaatccacaaggctctcgcgagcctcgactgttttgctggcaagcatacccgtgatataatcaaatttcaatccacaaggctctcgcgagcctcgacagcgatggctcttccgtcttgccggttaccgtcatatttcaatccacaaggctctcgcgagcctcgaccaagaagcccctctggacgaaaataatcaggatatttcaatccacaaggctctcgcgagcctcgacgtgcatctactagcggatcaagctggacgtgtgtatttcaatccacaaggctctcgcgagcctcgacgccaaacgctggatgacttgaaaaccagcatcgtcatttcaatccacaaggctctcgcgagcctcgacggcaaaaatgcacaattattcttgcatctatgccacatttacatgcttcatattatacatcttctacaaatcgtttatcaagttgaaatttcctcgcgtaatttaatagtattttccggccaattgtagtgcgaatctccctgggattttatgtacaactactattcgcacttggttcttcttactaaagatcaatacccatcaaatcaacccatagttaaccctacagttttcaaacaagcaatgtaataatgaaatattatgtttaattttcactctaaataggctgtatacttatcacgcttccccttgcataactcttttggatattttccgttatttttattcattttttcagtaaccgcactgaaaagatctaaccccaaatcatccgaaagcataagcagatatataaagatatcagcaatttcatccttcattctatccagattattttctaccgcttcctcacttgatttccattggaacaattccagcaattctgatgcttcaagtgaaatggagattgataaatccttaggattgtgaaactttctccaatctctttcctctctaaatttatttatcttgtttattaaatcctgaatattaatatcttttgccatagcagctttccccttcccttttaaatatattttctttgtaacactgggaattatagagtatttcgaggtgagtagtaaagatgtatagtcgacataagtgcttccaacttccagtcgttgaatttcaatccacaaggctctcacgagcctcgaccagccgccggtttggggtgcaagtagtctgtaatttatttcaatccacaaggctctcacgagcctcgaccgtttttgatgtgattgcagcaagttcctgggacatttcaatccacaaggctctcacgagcctcgacagcttctgatttagatggtgcgaagaaagaagtgatttcaatccacaaggctctcacgagcctcgacctgctcccaatccattaccttgaccggaggccgctatttcaatccacaaggctctcacgagcctcgacaccggcgctaagacatacagtcaggctatcggtatttcaatccacaaggctctcacgagcctcgacattaaacaaagtttaggcctaaatattgtgcaatatttcaatccacaaggctctcacgagcctcgacagcaaaaatacacaattatccttgcatccatgccaaatttatatatcttaattatacaccttcaacaaatcatccagcaagtcaaaaaaatttctcgtattttaatcctattttccggccgtttgcagtgcgaaacccctggaattttatgtgcaactattattcgcaccagagcttccttactaaaaatcaaccctcttttaaattacctccattatccctatgtgctaaattttcccgtacgatcctaaacaatcatttaaaatggcggtcgcagttaactgtgtacccagcagtttattatgtgttgtcacgctcgaagaattctaaatgtatttacataaatgtttatattttttatatgaacaaagtatataatagattataattccgcttcaaactaatttaaagccgcttaagataaaatcctatctccaaatatcagcttctcttattacgctttcattttacttttaaaataagcctcaagtttcttgttcgtaaaatacactctgcaaccatccatacctctgcttaataaaatataataattattttttatatattctaacaattgagaatcatcaggatcctcattttttatagtttttccatttatgtcgtaaaatgaatctctgttagggataagtttaccatcttcacttatgtcaatatcgtcaccaatgatcactccaacatagtttaaatcaacacttaaaactgcatgtgtacaccccacctcatccttcgaatttttctgctctgtccatttttcactgtttttattccaacgtcgtttaaaatcgccttctataaaatcatatttaccggaatctttttttgaaatccactcaaatgcatatcctgataaaattcggcttctttctgcgccaggaatagactgcttatccttcacccaacgttctaatgctttcatactgtgtacaatattaaaatcatactctttaaatacagttggattataagatacagcctcgatttgcaatatatttttcaatgcgctgatataatcctttccatctgccactttaaatttacctcttattcggaactgctgttcaagtttaagcttataaaactctttacaccctttttcaaaagtacgtatgtcaatgtcagaaggtctaatcctctgatatttatcataaaagataacaagattattagtaattctttttaattgctgaagttcgttattttcaacattgtccttatccaaatgcttaaacatccatccatcttttgaaaagtattttcttaatcgctgcccttcatcaacaactactgtatcatatcgtttacttgaatttataatccccgctgcagttgccacagtaacatttaagtttagttttttatacagacctctgaaaagcttaggcagagttttattcggcaaaattacagctatattttctgcacagactcctttttcatttacaagattatatacaatcgtattggtcaataatgatttcccggtacctggttccccataaacaacaattttatgctgcggcttttccttgtctattatagcttcacaaacataatcgacaatcatttgctgttgttccgacagtgttttgaatggagaataacggtataataaggtcatttcaatatccttatggttcaaagtaaccaagcccatcttctttaaatcattccataccgggattataatatcgctatatgattctattttatttgaatattctttatatttttgatatacgcctgtattcaatacttttcttttttccgccagaaagcaggcgatcaatgctgtttctaactcttttataacgctcgcattaaatagggtaccataaataattaataattgttttaatttttcccttttaattatatttgaatgctccttaactcgttttaaaaatctgctggactctccaatataaattttagaattgttatataatatatatacaatcggataacttttataaactcgggcctccccacataccgaatcaagaggtttcgttcggtattgttcatactcaatttcaaaaccggcaatatcaaaactgtcaattttataattcaatcccataattaattttcactctccaaataagctgtattatcaccttttcaactcttatccgttttatgttccaatatttttatcgaatctaaataatccttctccacatcactgagggttctggttttatatattctgtattcactcgttgctttatcaactgcttatttatgagtaacacttccgtttccttgaagtaactgttcgccactcattgtaaggttacgatccaaatgctctgtccaatgctcatagtcattgcctgttcccactctgcctgacgttccgcaaaatcaagataccatgaaacaagttgtcccatagcccgaagctctttttcattcagatagtttttggcaatgacagtctcctttagtgttggctggtttcctgcaaatgccataagtcccataaactctttttcagcatgtataaataacttctgctgcagtttatccatgaatcgcatagtgtatcttattctgaacctttttaaacaactgaattgatatttcagctttcggatcatagtcaatacttgtagcataaatttctaagacctgtctgtaaaataccttctcagaagcacgtatatctctaatacgttcaagtaattctttcaggcgctcatcgtccagtgcgaaaccttttttcatatattcttttaaaatacctattgcccaaatcctaattgtgtaccgcgctttgacttcacccgataaccgagcgaaataatcacgtcaagattataataatctacatcataaaatttcccatcagcagcagtgtaggcaaattttgcccatactgattatttagacaattctccatcttaaaaaacattcctgatatgcttgcccattacacttctatctctctggaacagctctgccatctgatcaattgacaaccaggccgtatctccagcaaaagttgtatctatctttgccaaaccactatatcttgtgattatgctccgctattttcctttcaaaccacaattccgcatcattattaccgactcgacatgtgttgagtggataataatgatgtctgaaagacgtggctcatccctggcggaatttctcttatctaactttatttatatcgcaaataaagtaagcgccaagtatcaggggatccccaatacatttaccccgacaccagccactgatgtcagggttgttagcattttactctgatttattgctacatgctatcctcgctttttcgctccatggagcaagattcgcgagttcggcatcgcttgtatcggtacttgggcgactgtccagcaggtactttaagtagctgtatggatggagtccatgagcctttgccatttctaccatggtataaactaccatgctcgcattggctcccgcctgactgtcgctgaacaaccagttttttcggcccagggttaccggtctgatcgagttctccgacggattgttgctcaggctgcaccgtccgtcttccagatacgtcatcaacgtgtcttttcgatttcggatataagtcactgcacgatccatacggctgcccttttccggcctctgtgcatccagccagcggataaagccttccactaccggtttttcatctttcaggcggcgcttgtgtacctgggtataagacagtccttttgccttatagctcctctcgtattcgaacagcttgttacaatacaggacaccctggactgccggatggctgtagtccttatcatgaccgttcggaatggcctcgatcagatatctccggatatgtgcgtaacagcagcaccgacgtatcttctttagcttgttatagccactgtatccatccaacatcacatacgtgccgtcatcgatcccttccagaaagccggccgcatttcctcctgccctggtctctgtgtagtgatacaggatgataggcggcagccggtcttccccggaacgtatcagccagacgtaggacttgctctgtggccggcggtctggttcctttaacacctggatgggtgtttcgtctgccataaggaagtgtctttccaacagctggctgtgaaagtagtcatacaccggctgcagataatcctgtgtgcaggtgatgatccagccggccatcgtagtacggctgatgctggcaccgagaagttcaaagcctttttcctgtcggtacagagggagcgcatctgcatatttctcgtacatgatgtgggacaccagtgaggaagacgcatagctgccagggatcaatgcaggggctccttcgtctttgataaactgtggttcttccgtttctttgcagacggggcagccatatgtggtcgcgatatagacgacacgttccagcttcgcacgggtataccggatctcggtccggatcacctcgtgtccgatcgggaccatccggctctgacacaccggacagtgcttttgctcttcggtcagggtatccacctccacacggcagactggaagattcgcaaacatctcgtcataactcgctttgggcttgcgtttcttcttacaggtatttcgttcaatgaattctggttcgatgagttccggtgctggttcctcctcggctacagtctccgaaaacaggttcagctgcccgggaagatccttgcgtttctcgctggaactgccaaaaagtttctgtttgaaatactcgagctgtgcctgcagatttgcaatgatccggtccttttcgtcatccctggcattgcgttcttccagcaactgctgcagagacaggatcaggtcgttctgggtacggatggtcgtattcagttgtgagatcgtatccttcagttccctgaactggatatccttagcgctggatgccatggacttgccactccttttcttattactgatattttaccagaaatcatgaaaaaaagcgaattctgccagagcgcagtcccgtcataatgacggtggataacttcccaggattgtcggatcagcgctagaaaacgagctttcagctacaggataagcctttggatctgcgacatatcgggctaaactgtggattcccggggacttatccgcagaatcccaaaacacggatttgttatccacgattccgggtgagaaacagctcgaaaaattcagcaattttacaacggatctttgtcaggcatggatcgctttgggctgttcgatatcaagaccgctgagcagccagtctaactgacgccaggtgatgacctgggcttccgagctttttcgtggccaacgataacgtccatgggaaacactgagacgtttgtataaaagcacatatccatctggttcatggagcagcactttgatgcggtcaccgcgttttccgcagaacaggaacaaagaggactgatccggatccatggaaagtttatctctcacgatactgcacagtccatcaatagattttcgcatatccgtggtcccgcagacgatgtaaatgttgtcggccacagaaatatcgcctaacatacggagcctttcacgaggctgaggatccgatccagcatggcaggttccgtaccattggcaatacggatggtcgcccgaccaagagatatttctatcacggcagcaagtggggcctgttgttccggtatttcttgaatcgtaccggcagacagcacgctgcctggattgctgtctgtttttggaccgaggtccagcctgaccacttcctgcacagcaggaggactaatatattccctggaaaccggatccggtatatcatagcaggccttctttctcaagcggcttacccagttgtaaaaagtgcccggatggatcccatgctctttgcaccactggtaatccgtgaggccgctgctccggcattccatgattaactgatactgctggtcagccggtactctggcattgtaagtagacattgtttgaaacacctccataattctgtagtaaaatgccagcatctatccaaacataaaagagatttgggagtaaattgcttgcatctagctatactcattatgaggcaaatggtagttaaataccagccatcctaatatttggcgcttaccaaataaaagtaccgtttcatgtcgcacctacttttattcttaccagctttgttcttcataaagtggacttgaattaggcaacaagtcgttgtacaattactccagttctttttcaatatcttcaatggacggaaggctgctacgcaattcttccggtaatgccttagcgatctgatttttccactctgccacgccaatggggttctggtaaccagctagagaatactctactacagtttcgtttttaccctttaccaacagcaaaccaatcgttggcttatcgtccgggtgtcgcagaatatcgttaaccacattctggtacatatttagttggctaataaatcctggttcaaagtcacaggcctttagctcaactacgacaaagcaccgcagtttcagatggtaaaacagaaggtcgagataaaaatcatcaccgcctacttccaaatgtacctgtcgtcctacaaacgcaaacccttgccccagttccaacagaaagctctgaatatgttcagtaagttgccgttcaatctctatctcccgccgaggcatatccgttccgagaaaatcaaacaaatacggatctttgaacacctgattaaccatatcggaatccgcttgcggaagtgctgccgggaagttattcacactcctaccagtacgctccatcagtctgctttctatttgcaagtctaaaatcgttttactccaaccattttcaattactttataagcataccaaatacgactttcttcatctttcagtttgtccattaaagaaatattagttcgccatggtatttgtgcaacgacccgttgcacaatttcaaagtcaggccaactctcggcaaacttcctcatatattttatgtttcttggagaaaagcctgacatttccgggaaggcatcctttaaatcctttgccatacggtcaataatttttgcgccccagccttcttcctcctgctttttaagaatacctcttccaatgttccagtacaggcaaatcatactggaattagcatttaatacaacagaaatccgctgtttttgaatttccgattttacttcatctataaatttcaaataagcatcactcatctcggaaagatttggagcaactgggaatattactccatctttattctttcccatatgatttcgattatccaatttctcacctcgctattccatttaaatctccattccgcgcgccttcaggcgcggcacaaatagtgatgaaagattttcaaaacctctacttcatgcgataataactttcaagaagctacactacaaagcacgggaggaggagttgtaaattctttctcgttttagacagcatttaaatcagtgtaagttctgccttttcaagcacaaataagtggctctataagaccgtacactaagaattgttttaacgccttggttaatttgtgtggcagttcagtcaatggcttcttatctttttcagaaaggagtctgactatgaaagttacttacaaaacctgttgtggtgtcgatgttcacaaatcatttctcgttgccacaatcattactaccactggtggtatcgaaccttcctatcagaagaaacgttattccacctttaacaattcaattcttgaattcaagcaatggcttcttgacaatgactgtcatgatctttgcatggaatccaccggtaaatactggattcctgtctttaatcttcttgaagatgaaatcaatgtcaccattgccaaccccaaatgggtaaaagctgtaaaaggcaacaaagatgatactaaagattctaaatggattggagatttattccgacttggacttgtaaaaggcagttatataccttgtaaaaagattcgtattttacgcgagttcacaaggtatcgctataagattgtttcctgccgttccagtgaaaagaatcgatatcagaatgcgcttacggtttgtaatgtcgcactggattctgttgtatccgatatctttgggaagtcatccacatccattattgactatttgcttgaacagtctggcaattctatcaatcatgaagaaatcgcttctaaacttcttaagagcctcaaatctaaagaagatgccgtgattgaatccattgaaggataccagatgactgattcccaaaaatatcgtatgcacctcgtccgtgcacatatggattatatcacagctgaaatcaatgatgtagaccgtgaaatagaaaaattgatttcttctgatcctgattttgaaaatgcgatccagtttctaatgactattccgggtgttaaacgtgacagcgcaatcactgtcatctccgaaatagggattgatatgactcagttttcaagctccaaacgtttatgttgctgggccggattaactcctggcagcaatgaatctggtggcaagaagaaatccgttcgggttacacgtgccggtgtctacctcaaacctgcattagtgcagtgtgctcatgcagccgtcaaatccgagaaatctccttactacaagaagaaatatgaatctctgatgaaacgccgtggcaagaaaagagccattgttgcaatcgcccgaatgattcttactgcaatttaccagatgttatcaactggtgaatcatggaatccaagcgatttgtataaaatcgatatacctgaagctttactggaaaaacaaaaagcaaaagccatcaagcaagccatgaaactattgcaacgcgagggattatatcctccaccagaaccaatagcttcttaattgttgttttaataaacacttataaaaagttgccacttgctgacagcttagataagtatgccacttttgggctgtcctctactttctttcacactattccccttagacaaattcctctacttataccatacgcttttgcaacaggacaatactttccgtatgtggcgagtgaatgataacgattttaggaaggcatagctgacccttagctgaaactgtcaattttatctatcaatattcaaagacattatgcctagaccaatcagccgtatcataaattgtataatttgttgtaaatattttgtttattaattcctctctattaatccgtctccataattcttcaataatatttccagaaacatgtcttcccaactctcgctctatacttaagtaaaaatactggtttacatcatccatattcattcctgtactatttgctattatcgattttctattaacaattaatgataatagtagctttgttaaaattaaatccctttttgaatttgaaaaatccatatcatttactttcctaactatatattttgttagaggatgttcaaatgaaagaaacacaccctgtttacaattaataccaaattccccttcaagtccttttattatcattctattactttttggtataaaaaccttattatatcttctcattgtgtcactatctaataagtcaaaagcaaaccattcatcttccccttttctataaaccagatctatcctcctttcttctctaaatatatttatttcgtctacgttttttccttttaaagctccttgatgtaatacattttgagcaacaaaatcacataataatccatcattgttaaactctttattctcctgtaacatacctactaacttacttaatgtcaaattggtcctagtttctcgtaataaatattctgctgcatttaccatgttgctttcaataatagttatgctttctaaattctgtatataacggggacttactaattgtctctcgctacttctttcaaaaacaattccatctatttcgtcaaaaacgttctgaagtatctcaatattttctatagaatttcttacatcattataataatttttattgaagataggattaacgatatacccaacttcagatgcaatccacgatagagaatatcctttatctttaagattttctatttgatttctaacaaattctctatagatagagtatattgtttttaataatccttttttttcctcattatcttctacagatgatcttgctacatttgttcttgcatatttattgtctttactatttaatatggcaataaaattttgtccttcatatcctggagtatttgatgaaactctaataccttcaaaacaaatacctatagggattatgaaacttgttttttcaactttactaggtctatcattatattctactaacgtatattcttgcatatatttactatatcgtaaggcatatgccatcgttataccatcaatggtttcctctgtaacaactatcttttcattgtttggcacacttccctgttttatatattcttctattgcatttttaggcgaagtaaaacctatttttattttttcacatttattacaatgtagaaaaacatcacaatatggaaataaaatccattttgaaatgttctcgtataaattttccatggatacatcctctctaatacgtaattttatagctgttccatgttttttcatttcatcaaataattcatcttttcttactttctttaaaagatattttccatctacattccttaaagtaattaaattagcctcgccattttcacttgaacacgtaattatttcaatatcattcgcaactaaaaaacaagttaaaatacctatcccaaatcgactaatagaaacaaattccggatgctctttaataaattcttttgtgctatatttagaagctcctactttcaataaataattctcaatatcaaagacagtcatacctgttccattatcaataaatgtaagttctttagatatatcattccagtaaatatttatttgtccagctgttaaggcttctttattatgtttctctagttcattttgaaatttgatagcgtctaatccattttgaactaattcgcgaagtactaccgaactgtcgttatataatgtatgaccaactagcatctgtaaaatgttattttgatctaattcaaactttaatagttttctttgaaattctttagtttttatcccttcatcatctatgtttaaccatggaaacatataatttatcgttccatgcttttttatagaattttgtactaaatcataactactctttaattcacttttaacatactttaaatactccattaatgaaaaaaaggcttctgcttggtttgctttctcaaaatatgccgttatctcaattgtattactttgaatttctttagttgcatctttctcatcaaacatttttttcggagcaactgctcgaatagccatttgcttctgccattcaattatacttattggatctgaaggacttatcaatctatattcaatcgctggagttctatccattgtaatgtgaagcaaatctgctgtccgcaatataactgctatatattgcaaattcactatttcttcatcagatgagccatatctttttctaggattatatattgcgacatcatccaaattattcaaatgatggctttcacagattaatcccaaatcctctctaaaaaggggatctatattttctaaaagtttgttaacctctgaagatatttctaaactatttccatcctcaataaactcatctcctaatatccattttcgtactctacaggcatgattctttctaacatattcttgatacaagaatttatccggctcttgcataccttttactttatctaaaaattctttatcaacgttatccttttctaacattcttttatactcacaaaatcctgattccattctagattcatattcttttattgaaacaaacatccctaaatcatgaaaataaacagctaataccaacatcatccattcagctaatgttaatttattttttgtttcttttggtatcaaccaatcaagcatcttcaacatttcatctatatgggagatattatgtttggtgtattgatcaaagataccatttttcccaatgagttccagtattttttctaattcattacgtatatgtaataactttaccccgcttaaacacctcaaatgttctgcctgctctgcattaatctccgcactatttacaaatttatccatcatacttctcctttttctttagaatagtaattcttttactgcatgaaaattatttttcattaacatcctaagtcttataattactatctatttacattttcttatttagctaatttatacttgatttttcatagctggtctcctgtatttatctaatctgcttcaactttactattctcgacgcaattcgacacaaacctcgcagtgcggtgagtgtatgataatgatgtcataaaagcgaatttcgttcttgatggaactactgatacatatgtattttcaattcatctcctcatttccatttatttttccgaatcagattgcatttcattttttagatattgttccaatactccaaactgtttttcgtccagacatgttctattggcaatttttacgcagactgcaacttctgcgccaaaatagttctctggaacacgatttaaatattcctttaaggcataaagttcctgcataaggtagcgattttttttagaaaaccatttgcacagaaaattacagacttccttcccattctcacaaccgttccccatttttagttcaaaaccattatcattaatattttcaattttcatatattcacatggcttatcgcactgacattttgacatctgagacatatctacaataactgttaaaatcaacttttccacaattgatccaggcgtcagaccccctttgcctgctactatactataatctgttttcagttcatagccctgtgttaaaagatgagaaatccaatgaaaagcggattcttccgacatctgatccaaattatgatataggatgggcctggatattctgcaattactcatatccagtaaatcggcaagccgaagcaggattttatcaaacttaagactaaccattttttcagcagctgatgattttgtaaagtaaatatctctttcatctgcttgatgagcctctgaaatttccgcaacaaattcacgaagagtttcatccaaaaaattcaagtcttccctggttcgtatttctaccgcactgtctgacgcgtgtttttccctgattttcttttcataataagcatctaacctcctgaaactctgggtcatccacttttttacctgcgatatatcttccacatccgactctctgtattctattttttcccctttcgcaagccgcgtctttaacgcaatctgctgatggatttccgataaatgctcccaggcaatactgtccccgctttctttatctattaaaaatgcgtctaatgcgggaatttttaccatggatatgtcgtgaagataacatgccaaaaataaagcatagaaatcgagcgaagatatctttaaaaagcctattgcatggattagttttactatatttcgaattaacgcaatcgcatgttcctgattatgaagcgtataaaaatacagatgtttggatccgtttttccatacctcgcaggtatactggtgagtcaaaatcaacttatcgattcggattggatccgccacaaaagactgaaaaatatcgaccacttccattaccgcataatccaaatccgctttatttttcgcatcgttcaataagattttctgatctaggaatacctcttctgtaaacagccggtttctcaaaaatagtaaaatccgaaactcgccgcaactcagaggcttcctattaaactttctaatcacaaagcaatcttctatttctacgtcaaaaagctgcgagtacacagcattagcgaccattcgtataaactgcgatgtattttcacttactatccctgccatttccaccatatttttagacagcagcctctctaaaatcgcatttttccagtttttcttctgaatctgctctacccaatgttccgctacatcataatgcttatgagaaaatgacttcattttacatgctgcaaaatatttcaatgttttatacggatcaataaattccataccggattttttatatgtattttgatcgttattttccttttccccacattctatcaattctttatacactttataaagaaaagagctctccttattttcttcttcaaaacacaatttgttgagttctccaatatactttccaagctcttttttctctgtatcgctaatatcctcacaatacatggaaacagcagcgtcccatatattttcattataggactgcataaaggctttcaacttttcctctttagtatcatatttattgactgtatatataatctccatcaattcttttttattacttttatctgtttcacatatatgtcttaaattaagacgatgttttcgatattcaaagaaacgataataacgaatccaacgatcacggaatttactccagttctgtatacgctttctgaattctccaattgcctctggattctgttcttcctcaggcgcttcctgcaattttgtaatctctcccttcgcctgttccagcctttgatccaactctttaattttcttctgaatttcatctgaaagcgccttcaatctcccttccagtataacatcttcctcatccgaatacattttaaatatctcatttccagcctgagatgcctcccggctgacgcattttaaataaatctcactttcatcgagttgatctaaccgtataaagctgctcttactcacagccttatttttatccacaccatgaacatggataccataaagccctgcagctctcatagcagacgcaggctttggaagtaaagacctgttatctttcttcaaaagccttttttctagtttttctatttcatcattaatattattgagttgctccccaaagctatcttcaagaatatcatttgtaaaaatcacagaatcatctacgtaaaaataactaacccccttaaacttttcctgaaaaattcccgatatcggtatcatgcaaatgtttccgaaaaaataagattgtggaaggccctgaggaattccacgcacaaaattttcttcaattacaggctcacatgattccttatttaccttatgatactctttcttcattttattagaaagattcgttttcagcttacaaaataaaagttttattaaaatccttttcagtaattctgtatcaggtctttccatatttacaggaagtctttccacaattaattgataaaccagcatcggatcaatcgtcgggaaaaaattttccaagtcaagcgacacctcatatttatattctaaagaagcattatattttttcaatgcttcatttgcattttgtgtatatgcctgatattgttgcttccaaggtttaaacaaaaactccggatttaaggacactctgtttccataaaaatttcctggcaataaccgacttacatttgaaagataaagttttttctcaacatccgctatctcatataccaataaatgaagcattgccacaattgcgatctgactgataatgtccgttgtatgaagtggtctatatgtaaccttctctttatcatccagcttcttaggtcgaaagtaaacataagcttctataaaacagtcgtctttatcaatcagatctgtaatcttatctctgacatttttaattatttccttaatatagatttcatcatacttatcctgtaatcgataatacttttccttatcattttctgttaaaagttcaaaatcaaatatgtatgaacgcaacgaataaatggcatgataaatattctggtctgacagcaaaaacgttctgtatctcccatcgtatttcacttttctcttttgtgtcttttccattctatttttttattcccccactctttctatttttcgaagacgtcttaaaatcgagaaattcttttaaatttttcaattcttttagttcttcactttcaatgattcctgctttactgtggtacataaaacgctttgtctcgcagagggcactgcattcaatcaatagtttttcatcacataccgtgttttcatcagaaaaggaatatactttattgattggaactatcctttcctcctcctcatcccatttactctcctgctgccaataacgatctatgattaatgacacacctgagtagcaggacgatagctgaaataaccgttttactaatttatattttttataaaaacattccaaaaaatgcaaaaattccatactgtaatgtggtaaataagtggaattataataaaaatccttatttgtttcactgagaaaagatgaaaaagctttaatttctttttcgaattcttcctttaatctcttctctttaaccaaccgctcacccaactccatataattttcccactgtttttcgatatctgtcaaaattcatcgcctccataccagatatttgaaaactgtattttcaaatattgatgtaatttttctttccaacctatatattcttcgtagtcctgctctttatcttttttatgcatcatttctaacaaatgagctacagactcttttccatcatatatctgctgccatattattgtttctgattctaaaatactcttacgataatccggaaattctaccgccttcagtcgatatttccccaacggaggtcttttatttaaatcctttattcttctggtttcagaaacagtaagcggcatctctgttatctcaatgttaagaaatggaggcaagagtatttctctttcatcccaatgtttatactcccttcttgataatatcttttcatagtcaataaaaggaacattttgggcaagttccatttctatcaggacaatattacttttctgagcaaacgtcgtatcaaatccactctttgagcaggaaaaaaacgatagggtaaagccgtttttataatatgtaatcgatgaagcacgttctatccgccgtccaactgcactgctgtcaaaatctgcatttttttccttcatcagagtaaaaatatccgtataaatctgaactgtttcgtctattcttctaatgaactccgtattcaagagatggtcttctatccaaatacgttcttgttcattcttgataccttcaaaaagaagtgcatttaacgtcctataggcatttttgtctccgaacatagcgtcttgagattctctacccatgtaaccgttactgcaccgttcccgggtatcgcctccataaaaccggagagcatcaatttttctaatcaggagctgctgactctcctgttccaatggtttttccatattctgtttcttcctctattatctcacatcaaaattttgtttatgatattatctaaaatgaaaatatcttaattaatgaactccatcataggatattcttattatattttattttgaattctaatgtaagtttagttgttgactatagaccatgttctaccaaataattcgtataccctttcattgaaaatcatttctccagaatagtagttatcacttaatgtccctatcattcttcacgaacttcatcacttccaactctttttcatcaagataaattttcgccacttctacatcagagaactttatacatttgccgctccatgtagtcagccccatattatttttatccgcatctgccctttggtaaatcacctctgccgctgtatgcttatgtgctgcccaatgcatcttgttttgaacctgtttaaaaaactgcacggaactctccgccttcggattgtagtcaatactggtcgcatagatttccagcacttttctccaaaacactttttctgaagaccttatatcccggatacgtgccagcaactcatcaaaataattttcctccaccaagattctttaatcgttcatcatccagcgcaaatccttttttcatatattctttcagaatatttgtggcccaaatcctaaattgtgttcctcgcaaagattttacgcgatagccaacagaaataataacgtcaagattataaaaatccacatgatatcttttcccgtcggaaccagttgttgcaaaatttgcaacaactgaatttcggcttaactcgccttctaaaaaaatttttttatatgtctggatatcgtggatttatttctttgaaatagatcagctatctgatctaacgataaccaaacagtatcattatcaaatgtaacttcaactttggtaactccatcctctgttgtgtacatcaatatattagatttttccactttctcttcccccgccaaaagatctccgaaacaaattcgataattatattattctttaagtttccatatccatttcactatattttaccatactcccctcaccattaccatctgaaagattccttcatgtccgtttattttcacctctgcaacataacattctcatttacctattattcgaactcacatatctgatatccctctttttcagcataacaaattattaactgcttctcataaacatctattctcttcactctatcttttacgacattttcaccatattccccattacacacaacttctcccaacatatttcttacatattgatcgttcaaggtaggtgaatttttacactccacctttcctttttccagccttgtaccgcatctccacacaatctttccacgctccgttctacgcctgaatcctaccccacaatccccacataccaataaattactaagcaaatatttgctgctataacggttaccactgctaatctgattgccatcagctgttctgagtagtctggctctattaagcatttcctcctgcaccttatcaaatatctctggagaaataatggccggatgacttcctttcacataatatctggtacgctgtcctacatttttctttcgtacaccctccaaataatcctcggtaaatgttttctgaagcatcatatctcccttatacttttcattcttcaacatctgctggattacatttgcactccatactttttttcctgttaccgtttttataccactttcctccaagtgtttttttatctgcgaaaacgtatagccctttaaatataactcaaaaatcaattctactattttggcctgctccggaacgattaccaactctcctaccacacatcgataccccataaaatgtttgtaactgctaaataatccttcctcaaattttcttttaatcccctactgaatattctcactcaagtttctgctttcttcctgccccattgctcctgacaaggttattgccgcttctgcatccggatcaaatgaattcacattttcaatttcaaaatacatctgtatacccctttcttttaaatatctcacaatctgcaatagttctaccgtattcctggatattcgttttgctgatttagtgattatgtaatcgattttcccctctgtagcactttctaacatatgttttaatccgttacggccctttttccctaatccacttcttccacaatcccagaatactcctgaaaatacccaacctggatgatctgatatctgttctgtatatgacataatttgatgagccaaactggctaactgcgtctctttcttagtgctgacgcggcaatatgccgccacacgcagcggttccatattctcttttttcacaggtatataatatatctttttcaaaacacatcacctcgtttcatcaataaggaaaaggcgcgaaagccaaaagccttcacgcctcaccacacgacaactatacaatctcacctaatcatcatttaacactcttttgcaacaggacaatactttccacatgcccactcataggaaacatatccacacaacttactctctccacccaataccctctctcctccaaatacttcacatcccgggccagcgtagccgaatcgcagctcacataaaccactttcttcggccccatcattacaatcgtatccaggcagaccgggtcacaccctttcctgggcggatcaacgacaatcacatcggcataaaccttatccttttcatactgtttgggcagcacttcctcggccttccccacaaaaaactctacattttctataccattgagccgcgcattttccctggcgtcttcaatagcctgcggaacaatctcaacaccatagacccttttcgccttctgtgacaaaaacagcgaaattgtgccaatcccgcaatacaaatcccacaccgtctcttcccctgtcaatccggcatactcaagagcagtgccatagagcctctccgtctgcaccggattcacctgataaaacgacaacggagaaattctgtacttcacattcccaatataatccgtaatataacccggcccgtacagattcaccacttcacgtcccaaaatcacattcgtcttctccatattcacattataagaaatactggtcatccctgggatttccagcagtctttccacaaagccttcggaatacggtaattttcttccattcacaacaaagcataccatcagttccccggtcctaaatcctttgcggattaaaacatggcgaatcagcccggtatgactctcttcctgatacggcttaattccatattgggtcataatctgcttaacagccgccagaatctcccggttctcctgaatgccaagcaggcagtcgtcattctcaataatgcaatgggttcttccggcataaaaaccggcgattacctcgttctccttattcatcccaaaaggaaactgcgccttattccggtaacgccacggatcctccatcccgattatcggctccatgatgacaggctttcgtccgctctctcctccttctctatctcccgctctatctccttctccatccccaaaattttctcctgccccaggtccctcccccggcagatacaggttatcaagcccgccaatccgctttagattattataaacctttctctgtttaaacttcagctgctcctcataactcatcatctggagctggcagccgccgcactggcgcgccaccgcacagcgctccttcactcgggcaggggaaggcttaagtaccttcatcagtctggcaaaaccgtaattcttcttcattttcattgcctttgcttcaatcaggtctccgattacggcatctttaataaaccagatataaccatccagttttcctacgccttcaccactctcgctcatatcctctattatcacttcaaagacatcattcttcttgatattcatgtctattctctccattctcccccaaaccgtcacaccatcatgccatgcagcaatcctgacggcatgaacagttacatgccatcttacataccatcacaaatacttcgcccgctcaccgccgatatacttcagtctggtcctggcacacaccacgtgagcaccgccaatctccttcacggaaatccttaccggtaccgccacagccctcagatgcatgccaattagtgtatcaccgatatcaattcccgcgtgcgcctgaatccgttccactgccacaggacacctcatccccgcatatgcagccgtagcaaatgaccctccggctttcaacgcaggcaccacattcaccatctcatatccgtaccgttcggccgcctctttttccagaaccagcgcccggtttaaatgttcgcagcactgtgcggcaaggtaaatctcccttggctccagctccttcatcaaagcttcatataccgcctgtccgatttccccgctggaataagagccgattctgtgggctgctatctcactggaagaacatccgataaccataatctgcccccgctccatctgtgcctcttccagaagttcctttgccgcttttcttacttcctgcccgattgcttccagatggcctgctgtttccttttcctccgacacgccggccggatgccgatacattatatccactttcacttactcctttcacaacactacgaagtgcataagaatactggtacagaaatacataaatttcttagtcacagctcccgctgtctacgccaggagcatgtctgcaagctggccgcaggagcactgtgccgccgcttcgcagacgcacgcctgacgcagatatcaatcactattaacagctatctatgcattgctgtactaaagcgtgtctaaaaacaaatttccgcccctctatatccccctctccacgcactgcggcatatcaggccaaatccgattaacacagcccatacgctgcgctcatttggaccaaatttcccacaaggtgagacgtacatctggcagaaaactattttcaaacacgctctctaacatcccctgaatttcacttcttaaatataaaaaaatccatactgtttacaactctgccaaaaacgcagttctatggacaattcccataacaatatcatgcaaaaagctgcagaacactgttcataaacagtaacaaaaaatcaaacagctattacagctcccatcacacttccaggtaaaattcccgcacccgatccatcctggccgtcattccggccagcatcatatcagccactgtgaatgccgccatcatttccacaacaacgaccgccctcggaacaataatcggatcatggcgccccttgacgctgatttcaatctccccgccatcccggttcaccgtcttctgcggcgatgcaatcgaaggagtcggtttaaaagcagcccgaaacacaatctctgttccgtcgctgattcctcccaggatgcctccggcatggtttgtcctcttgccgacccggccatccggagaaatacaaaatgcgtcattatttaatgccccggtcgtcttggcagcttcaaatccgtcgccaatctcaaaccccttcacggctccgatcgagcaaatcgctttggcaagatttgcatccagcttttcgaataccggctcgccaattccggccggaaccccctgtatcacacattccacaatcccgccggccgaatccatctgcgccatcttctcttccagaaacatctgcgcctcagcagccgcagacgcatccggcatatacagcatattccggctgcactcttccatatcaaaccgctccggctgcacctggatatttccgattgctttcgtatacgccgtcaccctgactccaaggccctccagaatcttggccgccacagctccggccgccactcggccgatggtttcccggcccgaggatcttccgcccccgcggtagtcccggaaaccatattttttatcaaaggtataatctgcatggcccggtctgtaataaccggctatctcactgtaatccttcgaatgctgatcctgattccgaatcatcattgcaatcggtgttccggttgtccttccctcaaatacgccggacataatttcaaccgaatcactctcatttcttttcgttgtataccggctctgccccggttttcttctgtcgagatatttctgaatatcctcctcagccagcaaaagtcctgccggacaaccgtccacaaccacgccaatccctgcgccatgggactccccccaggtagtcattgttaatatctttccaaatgtagaacctgccatgctttcctgctccttgtctctccatacatattgcgaacttttcaccaacccggtgatataccgtatcgtctcatacacaatcaggcattccgcttacagcttacttattgcttatttaaccgcctgctcaccgcttacttactgcccattcacttatttactgcctgctttccgccttcgtcttcttacccccggctgttccattcggcaccctcgtgatcacacagcagttcggttcattaattgtaatactcctgctgcacattaccagcaggcccttctcataatccacctcaaagaaggaaatgctgttgcttgcatgattaattgatgccagatgcttttcatccggaaaaacagcgatatccttcgggtaatcgccgctgataggcagacagcttatcatggtgagtacgcctgtctcgggatctcttctatatacgctgacggaattatcccctgcattgctgcaatacaggtaatcctccttcggagacagacggattgcacaggccgcggtaagctggctcaggcgttccggcgcagtggaggtaatggtctgaatcttttcaaaatgcggtactcggtcgccctcttcatattcatacgtaaatacgtcaatcacgtttttgatctcatacatcagataaataaacttcccgtctccgctgaacaaaaactgcctgggacctgactccagttcacagcgcagcgcatccacctgagtcagcaggccctttttctcatcgaaccggtataccttcacctgatcaattccaagatcggcgacaagcacaaaatgaccgtccggagttctggcgctgcagcttacatgcgggcggaaggttcgctctgcgacgctgccaagtcctttatgaaacacaccatccgtaatctcaccgaccgaaccgtcttcattcagtctcagaaccgtctccttgccatcatgatatccggaaacgaaaatatatttgtcctccgcatccgtcgtaatatggcagccacgcattcctttgatattggcgctgttcagcctggaaagtgcgccgttctccataatacggaaggaaacaacaccttcatctgctattgaatacagagttcttccatcatttgacacggcaagataagaagaattgtccacttccacttcacacctgtattgaaaacagcccttatccatatccacgtcataaacggtgattcccttcgcctgcccgttatatgaataagaacctacataagccatgtatttattccgcatatcttttcctcctcatattctgttacttgtcccgcagctgttccgtctgaatctgttccacaggtattatcacattttctctttcctactattctaccagcccggactcaaatttgcatccattttaatcaattcagtggtatttttttatgttttggagatttagataagcaggtgagggcgcggtcgcagaccagcggacggtgctggatgagtctttcgtcccggggaaagtgtgtcgtgggttggggctgcgggcgaagataaagtctgcggagcacgctctcgctccctgaaatgcatcgcgctgctaggctcgaaaaaacctcgccaatcagcgatggatttcaaaggcatccgcagactttatcttccccttcgccccaagggaagattttcgccgggacgaaagactccgccaagggtgtcgctccgccggcctgcggccgctgattgtctcacgcgttaagtgcaggggagaaccttgtcgtagccactcagtccttctgcagagaggagttatggcggcttatagttggttataaatttgtttgcaatatctaattaaaaaattactggatgccggattttacatcggccttccggaaacacgtagcggccgcgacaagacccactctgtttaaggttggagacaatcagcgcccggaacggaccatgtccggtgccgcaaaaatcttcgccggattccccctccacgacaacctatccacggggacggaagactcagccagcctcctcaccacaccggacatggtccgttccggacgcgtcctccaacctcagttaaatctccatttattcgacaccatttttcaccaaacctattgacagcagacgcagttcctgtataatgatatttgcgtcatgtttattattagtaaacttttaagttaattttacattcatttagtaaatgtaaacttttttcttattatattatccattcacaggccgccttcccgtccggcacggcaggccgcctctgtcccgcgcgaaaggaggagaccgtgaacatcggagccaaattaaaagaactgcgcacgttaaagggcctgacccaggaagaactggcggaccgtgcagagctttccaagggattcatctcccagctggaaagggatttaacctccccgtccattgccaccctgatggacattctgcaatgtcttggaaccaccatcggtgaattttttaatgaaacgccggaggagcagatcgtcttcggcaaaaacgactatttcaccaaggaagacacagaactgaaaaatgaaataaagtggattatcccaaatgcccagaaaaatattatggaaccgattcaccttgtcctctccccggcggctccacgtatcctgacactccgcatgaaggggaggaattcggatacgtgcttcagggcagtatttccattcatctgggaaaccgcacttataaagcaaaaaaaggggaatccttctattatacgagcgataagacccactacctgtcaagcaggtcaggagcatccatcatttgggtcagctcgccgccaagcttctaattataatacacacggaggaaaagtatgagccagccattaattgatttagttaacattaccaagagctatgacagcaatgttgtccttgacgatctctgtctatctgtccgggagaattccttcgtcactcttctcggtccaagcggctgcggcaagacgacgacgctgcgcatcatcggcggttttgaatcccctgataaaggaggcgtgattttcggaggaaaagatatcaccaaactcccgcccaataaacggcaattaaacaccgtattccaaaaatatgcgctgtttccccatatgagtattgccgataatattgccttcggcctgaaaatcaagaataaacccaagaattacattgaagacaaaattaaatatgcattaaagctggtaaacctggatggttttgaaaaccgctccgtagattccctgagcggcgggcagcagcagcgtatcgccatagcccgcgccatcgtcaacgaaccgaaggtcctgcttctggacgagccgctgggagctctggatctcaagctgcgccaggacatgcagtacgaactgatccggctgaaaaatgagctgggaatcacatttatttatgtcacccatgatcaggaagaggccctcaccatgtccgatacgattgtcgtaatgaaccagggctacatccagcagatgggctctccggagcagatatacaacgagccggaaaatgccttcgtagccgattttatcggcgagagcaacattgtagacggcctgatgctccatgatgaactggtagagatcttcggcgcaaaatttgcctgtgtggaccgtggtttcggcgtaaaccagccggtagacgtggttatccgtccggaagacatcgatctggtaaagccggaacagggaacccttgaaggcattgtcacccacctgatttttaaaggcgtacactatgagatggaggttacgaccccgacggttttgaatggctggttcacagtacggatatgtgcccggtaggcgagaaggtcggcatccatgttgatccttttgatatccagatcatgaacaaaccagcctctgaagacgaggaggcggtaagcatcgatgaataaatctgtaaaacggcttctggccggaccttatattgtctggatgatcggttttaccatcatcccgctcctgctgatcgtcttctacggactgaccgacaaaggcggagcgtttacactggcaaatgtgctgtccatcggcacgccggagcatgccaaggctctgtttttatccctgggcctctctctgctcagcaccctgatctgccttgtcctggcttacccgctggccatggttcttcgcaggaagaatatcggccagggaagctttatggtattcattttcattcttccgatgtggatgaatttcctgctgcgcacactggcatggcagacgctgctggagaaaaacggagttatcaacggcattttgaattttctgcacctgccgaatattgccatcatcaacactccatgggcgatcatcctgggtatggtttataacttcctgcccttcatgattctcccgatttacaacgtacttgccaaaatcgacgacaacacgatcaatgcggctaaagacctgggcgcaaatgaatttcagactctgacccatatctggattccgctcagcctgcccggaatcatcagcggaatcacgatggttttcgtccctgccctgaccactttcgttatctcgaaccttctgggcggcagcaaaatcctgctgattggcaatgtcatcgagcaggaatttacaaagggcagcaattggaacctgggttccggcctttcccttgtgctgatgatattcattttactgagcatggccctcattgcaaaatacgataaagaaggggagggcacggcattctgatgagaaaatatacattaaaacaatttttccaggacttttacctggtgctgatcctgatatttttatatgcccccatcgttacaatgatggttctgtccttcaataatacaaagtccagaacactctggggcggttttacgaccaaatggtacacgcagatgtttgagaaccaggcgattatgaatgccctttacaacaccctgcttatcgcttccctgtcggcgctcattgcgacaattatcggcaccgtggccgctatcggcattaacagcatgaaaaaagtccctcgcaccattgtcatgggcgtgaacaacattccgatgttaaactccgagattgtaaccggtatctccctgatgctggcattcattgccttcggcatctccctgggattcaaaaccgttttaatcgcccacattacatttaacatcccatatgtgattttgagcgttatgccgaaattaaagcagacaaataaatccacttacgaagcggcgatggatctgggtgcagggccggttcaggcattctttaaagtagtatttcccgacattatgccgggtgtcctgtccggcttcctgatggcctttacgatgtcgctggatgactttatcatcacccacttcacaagaggcgcaggaatcgatacgctttccacgctgatttacagtgaagtgcgccgcggtatcaaaccttccatgtatgcgctttccacgctgattttcgtgacagtcctggtgctgctgatcatcaccaatttttcaccggaggaaacgaaaaaaacagctgttccattgtcgccggaagaaaatgccagacggttaaaccgcagaaagagaaacagcaatatcaaacgcgctgttctcgccgcggcaaccgtggtaattatctgtgtggtcggtttcaccacctatggccgctattccaccaagcactccaacgagctgtatgtctacaactggggggaatatatcgacgattccgtaattgaacaattccgggaagagacaggtatcgaagtgacctatgaccttttcgaaaccaatgaggagatgtatcccgtcattgaagccggcgcggtcaactatgatgtcgtctgtccgtccgactatatgatacagaaaatggctgaaaacggccttttggctgaaatcaactttgacaacattccgaaccttgctaatattgatccgaagttcctggaaatgtcaagggagtttgatccggagaatctttactccgtaccgtatacctggggaaccgtcggtattctctataacacaaaaacaatagaggaacggggtcttcccgtaccgaagaaatggtcggatctctggaatccggcatacaaaggggaaatcctgatgcaggacagtgtccgggatgcctttatggtagccctgaaagcacgcggttactcgatgaacacagagaatatcaacgagcttcaggaggcaaaagccgatttgattgcacaaaagccccttgttcaggcctatgtcattgatcaggttcgtgataagatgataggcggtgaagccgcgctcggcgttattttctccggagagatgctctatatccaggaggaagtggaaaatcaggatctcgactattcgctggaatacgtcattcccgaggagggaaccaacctctggattgattcctgggtgatcccggccgatgcaaagaataaagaaaatgcggaaaaatggattaatttcctctgccgccccgacatcgccctgaagaactttgagtacatcacctacgcgacgccgaataaagcggcaaaagagcttctggatgaagacatgcagaacaacaaggctgtcttccccgacatggaccagcttgaaaactgtgaagtctaccgttatctcggggatgaaactgacgcagtttacaacaatctgtggaaagaagtcaaatcaaactgatgaaaacacgctctaagaagcagaccccctgactgcaccgctgaatcatctcattatcccggaaaatatggctgccgaaaaggcggtcctgctttccgggatatttttctctgcgcttactgcctcccgcccccggccttcccgcttttactccctgcgttcattctgaccgccgttagccagatttctcagatgcagatataccgtattctttgagatatcaagggcatgggcaacctggaccaccgcttccttcacctggaaaatccctttgtcgtggagaatgcgcacaatttccttatttttattggagctgcttacagacgcatcagccattactttggttttagcttctctgacagaggaggcaatcaatccctccatgtcctcattaaagctttccgtaattgcaggcgtcgccggaggttcattaaagaatgaggacaacatggttgaaaacggaatgtccaaatgcagattaatgcataaaaggccgataattctccctccctcgccgataattggtattgtagctgatttaagagtgctgccattctttctgttgaaatagacaagggagtggggggaactctgttttctaatccgctccagcatcgtaagcgccagatcggtgattggcgccccctcctcccggtttgtataatggccgttaataatcttgataaccgaatgttccaagtcctccagactgtggagaaccagttcataaccttccccaaaatattcgctgaaaccgtctaacaccgttttatatgaatccagaatcagcctgtccgcctttgtcaatattaaatatgccgccatctgctaatctccttccctccctgaatcatagttaaattataccatctgctatcctgtgaataaatcaggaaatatgaaattataatgaaatttattttagtaaaaatctcctattaaccattataactgtaaatctctatatattctatagaaataatcagtcttttaaatttatatttaaataaaattatagctattgacaaaaaattaatagtatgatatcctccaattacggataatatactgataattcttactgaaagcaatcaatcgcaaagtcaaaaactgcatgtatacatcttgacactcccccattaaactgaattttatttcattgtacctataaaaccagaaccaatattttaatttaataaataagggagggcacctatctatgaaaaaagaaagaaaaatcaaagaactcacaatccccatggccttgttcggtttttttgcaccgctcctgctgatcctgcttcttctctcgcaaggggtgggaatcatgctggcgctgacggcagccatctgcgtggaaagcatttttggcgtctatctgggatattcatgggaagacattgaagaatacgcattaaaaggaattgggcgtgtaaatcagaccgttatcgtaatgatactgatcggaatgttgatcggtgtctggatttccgccggaagtgtacagaccatgctatattacggaatcaatttaatccatcccaaactgtttcttcccatcgcgtttattatctgtattatcacctccttagtgaccggtacctcctggggaacggccgggacaatgggcatcgccttgataggcatcgcccagggactgggtatcccggctccgatggcggcaggcgccatcatctcgggcgctctggtaggcgacaagctctccctctctccgacacaacattgctggcagccgccacttcgagagtaaaactgttcgaccacattttatcgctttgttatgtcactcttccggtatctataatttcgataattgtatacagtatattaggatttaaatacggtcacggggaaatgaatctggcttccgtacagattctctcagaaagcctgaagtcctcctgtaatatcggtgtcctgatgctcgtcccccttttgtttgtgttaattctttcagcaatgaaaaaacccaccattcccgtttttgcaggcggtcttgtcatcggctgtatctgggccgtcctgttccagaacattcccctcaccgatgtcatcggctccgctgtaggtggttttaaaagcgcgaccggcaatgccgatattgataaacttctctcaagaggcggcgctctgagtatggcggaaacaatctttctctgtattggagccggtatgttctcaggcgtgtttgaacggaccggagttttatcccgtttaatggatcagttgagaaagatagtaaaatcagtaggcggcctggtattctccgttaccttaaccggtatcgcgctgatgttcggcggcgccggacaatcctgtacactcagcctcccggcaattgccttcagggatgcatttgaggatatggacgtccatccgggagtcctctcgcgaagtctggagtgtaccggcaccgtcctcggctccatcgtgccatgggatgcctctgccatcctatacagcggactgttcggcgtatcggtggcccaatatctccccttcaacctggtggccatactttctccggttattgcagtcttaacggcttatattggatttggagttcttaaatataatgaacagatgcatttcacaatgaaattacgcaaatataaataattgttggttactaccatgttatttacagatagaaggaggctaatatgacatcagaagcaatcaccaggctcctaaacggacttccgcggcaaattctttttcctggcgtgactcctgtgacaagaatgtataatctggaaaaactggcgggagccggaccgctttacataaagcgcgacgatttaaatggagtcggccccgggggaacaaagtccgtccgttggaatacctgttaggtgaagctctggcccgtaaaaacgataccattatcgcatccggacaggcaaactccaatctctgttcgattgccgcatccgcctgctgcaagctgggcgtaaaatgtattctggtacataacagcaacaggcctgagaagccggcgggaaatgccctgcttaactatctgtcgggtgtggaggaacactacatcggagaggtatctgaaaagcagcgggaaatttatatttctgaattggcggatgtattaacaaaaaacggtaaaaagccatacataatagaaaatggagcaaccaccatacacggcagtgtcggttatattcatcttccattggagctggcggcgcttggaagtgaatattccattacggatttgtttgtgccgggaggcaacggcggtctcgcttcaggaattgtacttggtacaatgcttttagggaacccctttcatgtccatgtcattacagttgaaaatccgaaggaagagcttcaccggattataaaagagcttgttgaaggcatgaaagaataccttggaacagacatcgatttaccgctcgactgcgctatgacaatacacgaagattaccggggcggcggctggggcattcccgcgaaagaagccgatgccatgattcagactgctgcaaatcaggagggaattttcctcgagcgagtttatacctccaaaactgtctggggcatgtacgatcttctgaaaaagggaaaaataaaaaccggcggcgcctgtgtcctgcactccggcggctttgccgccctgtttaaccagtattgatactgtgaaccgcaaaataataaattaggtatgtttacagccctgcacagtttttgcagggctggtttctgttcgcagaggagatttagttaagcaggtgaggacgccgccggtacggccagcggacatggtccgttccggacgcgtcctcctcacctcagctagaaagagcaaagaaaagtcttgaattatcatcataaaaaacgtaaaatcaaaataggcctgttaacaggccgccgtttcagttcacagactcaacacatacaacaggataactgagctgacgtaaaaacaagaaaggaaggtaaacaaccatgaaaatagcagttccatactcagacggccaggtgttccagcacttcggcaaatcagaacaatttaagatttatgatacaatagatgacgaaatcatctcctcggaaatcgtggataccagcggaagcggccactctgcccttgccgatttcctgaaggaggaaggcgcaggcgtcctgatctgcggcggtattggcgttggagccgtgacagcgcttcagaatgccggaatccagatcctgggaggggcagaaggcgaggccgataaatgtgtggaagaattccttggcggaagactccacttcggcgcttccggctgtgcatcctgttcctcctcctgcggccatcaccacggagacggggatgaagaagaatgtgacggtaatatcagcgcctgcggcacctggtgtcattgatgctaaaacggttgataaaaaaattaccataaacctgataacaaggtaacagttcaagctgtctgagctgttacatagcaagatatgtcccccggcaatccatgattcagggaatctggattgccggggaactcttttctatcctgcttttcagcgtctcaatacaagcatcatccccgaacccgatttcaaggatttcctgtgctcctgcgatttccagaatctctttccctatctcaatccgttctttatcgcggcaaagatccgtttttgtaatcactccaatcaccggtttcccgccgaacatagaactcatgcgtggtgaaaatgtactctgttcatcggttgccgagagaagaagcagtatcacgtccgcttccactgccgtgactatcagtgcgctgtaaaactgcttttgttccagatattctccgggtgtgtccacaattccgtccccgatcacctggatagactgcgtcttccggtagctgaccgtctccccggtcagccgctgcccgagcgtcgtctttccgcagccaatctttccaatcatcatgattttcttcatcgcctaagacctcgtgatttccgtcattgtaaaatgcagtgtctcgccgaggacgcggagtacatctttgagagccgcatccactgcggccacgtccccgcagatcacaagagaacctgagaaacggtcgacaaatacgatttccacctctgccgccttggtcgccacatcggctccgattatggcggcctcgctgggggtaatggttaaaatccccagcgctccgcgggttttgctgactacgcccagctttttatataaatcatcattggggttcgcaatcagatgggccattgtcacctgtttgccgggaacaaattcctggataatccgctgtttggaatcaaagggatttccttgtgtcatactgccatctcctttacaataatgtatcaaaaatctctttgcgggggcttggaataacagtgctggtgacggcgagtcctttttcttctcctgccgccataccgcagcgcacggcctcctccaccgccgccacctctcccgtaagaacggcaaatgattttcccccgattcccacaccgagacggacgtccaaaagcgtcacatccgccgccttagcagccgcatccgccgcatataccgcagctgtaacgctgaagaattccataacgccgacggcatttacgccgtccggcgccgtagacaggctgattgcctggatcacctggggatgtatgcggggaatcacgaccgaatcaacgagatgtgcgtcgatcacggctgcccccgcatccagggaggcactcaccgccgccacatccccgtaaaataaaatagtatatttccccggacataccggctttgcatataaaagcgccgtgtctgccgccttaagcactgcgtccgccgcttcaattcctttggctatactgttgctttcaaggattccgattgcttccattctctgtgcgctcctttaccactatactttactatttctgttacagttcagccttcggtcaaactgctgcaaatgctgcatagaaacggcaaaaaacgccgtttcgcgccgcgtaacccgggattttcacaaaaaagcagcgaaaacacctcgcggaatacaccatgactgaactgttacctattactcagcttccggttactcagtctccggttactcagtttccggttattcagcttccggacgccttgatttccagatactgttcctccaccttcacgacaccgctcaccgaggcgtgcagcgcgctgcccagactgccgtccggacagactgcgataagccggccttcctctaccctctcaccgtcctttactaccgggtatgacggtgcgccgatactctggcggagagccaggcggaccgtccctgcagccccggacgggagcactgccagctcatcaatttgaactgcctcataggccgccactcctgccctggaagccacgcgcccggtgggcgctttacgcatattcctgtcgggatccgccttccattccccttctgggcgctggtagcgaagtcctgctttggccagttctcctttcaggattccattaatccgtctcggctgcaatcccatcgggcacgcgaaaatttcgcagattccgcattcacagcagagggccgcatttcgtatgtcgctgtcatccagtatctcggttatatcatgacaggacgccagtttccgcatgatccggtgcggcttaagaggatgtccaagcaaagccctgggacagagctgggaacagaagctgcactggatacaggctgatttcgcccggttcagcatgtgcctgaccgtgacctccgagcgcctggcaatgctgctgtccgcagggagcacaataagacccgacatggtttttgtcacccaggcgttctctgcctcttcttttgtaaggagtttccccatcatgggccctccgtttacgaccacataatccgggataagcgggccgcctgccagtttcaggcattcactgaccggggttcctatcggaacctttgcaatgaccggctttcctactgctcccgtcacagtcagatatttctgagtaaacggccgcccctccatcgcctcatagatgcagaaaagcgtggccgcattgctcaccacacagcccacgttcagagggatgccgccaggaggaaccacatttcccgtcacttcatatacaattgtctgctcatctccggccgggaaaaagctttcaagccggtggaggctgacggatgaggaaaaaaaatggattgcctcctccagagcctttatctcccttgtgtaggaatgcttgagcgctatgacacaccggcccgctcctgtttcacgcagcagcatatcggcggcctgtatcagttcccgcgccttattcctcataagatagcggtctgtttggagaagcggctcacactccgctccgttgatgataatcgtctcaactgttccattgtattttgcatgagtcggaaatccggcgccgccgcagccgataattccggcctcatagataagtttagtcagcttcatattattcccccttatccttcgctatctcaagggaatcaatgatgccgacaatcgcgctgtcaatcggagagtcatcggaaccgatggcccgcctggctgtgctgccgctcaccaccagtacctgctccccgattccggccccgaccgaatcggctgccacaaaggtggctccattccttctgtttgtcgtcacttcccggacaatcatcagtttatggccgttcagtccctcttcctttttcgtagcccatacatggcctaccacctgacaaatcatcatatcgtccgcctcccctcctgccagtatacttctatccctgcatggcgaaggacatccttagccgaaggcgtaagaatcacgccttttgccagggcaaacttttttttactccctgatgcaagcttgcgggccaccgcctccgtaatcagctttccctcaaattccggcacgcaggtttctttctctgtatccgtctccttgtccatctctctaactgaatttccgccgttgtatctgtccgtatttccggttcctccggcagcgattttcattctggccgtggcatgtttcggtaatatacatgcattcgcctcatcaaaatcgatatgcatggcaagggcggcctgactgctgacgcggcatattacattttccagcgtggtcctgcgctccgctccgacagtcacggaaactctctgaccatccgtaatccctgcctgctccgcctgaggcggggtgatatgtatatgagcctgtgcgataattacgctgcctttcgcatgaatcattcccatagaaccgatgatatacacatccccggctcccgttaaatcgcccgacatccgcagcggcgcatcgattccaagcgtccggcagtctgtcagcgataactcggtctgaactgccgccctctcaggtccgagaacagctacattttcaattcttccttttgatgtgaccaaagtgacccgctcttcgcttaaaaactgtcccggctgggacagggggcgtttcggcgtcagtttcgccccggttccgaataattgttccacagcctctctggtcagatggacatgtttggctgagacctccaccggaaaatcgagcggcagctcttgttcttttccctgctctccacattcagcaagaacacggaggataatttcctgtatctgttgtctgttcataaaatgtaccggggcgccgttatgcatccgctcccggctcccctgcccctcctatcctggattttaataacagctcagacagcatgaactgttacggcttctgctgtgttttgcaaaaaaggatgtaaattccgctgctgagcctgtttaaatgtctgataatccccagcgtatccccctcgtgaaacgcgtttgccgcactaagctccgcctccctcacctgtgtccgcagcaggttcagctccaaagcctgctctcccattgtgggatcgggaaccggatgttctattccaaaatactccttcacattgtgggacatgcgtcgtagttcctcatgtcccagcccaaacagcaatatttctccgagtctttcctcttttacctcggctccgagaattgccctcagataacacaggacactgtcaagcgcaacgcggagggcttcatcctccttatattttgcctgcatcagcagcacccgcgcctgaaggccgtccaaatgtcccctgagtgcgatgcgcggatgcgttttgggtaccagaagatttccccgcagatgggtcatatcctccggcttttccccatacccctcaccggttgcagcgtcaatataggtatggcttccctgctttttaatcggagtacgggtcattacggcgtgaaccggcgcttctccggaatcaaatttaagatttaccgcccgatcccggaggtattctcttgccgacggcgtgacaaaggtcccctcgggcacatgatattccttagcgtctccccgaatcttctctgtccttaaatcagcttctgtcagcactctcatatttcatccggcttattcagcgtcgagtaccggcagaataagttccacttcgccgtgaggacgcggaattacgtggacggatacaagttcaccgatatttcctgccgctgccgcgcctgcatcggtggccgcctttaccgctccgacatcgccgcggaccattaccgtcacaagaccgcctcccacatgcaccttgccgatcagggtcacgttagctgcttttaccattgcatcggctgcttcaattgaagcaaccagtccttttgtttccaccattcccaatgcctgtaatgctgccatgatattctctccttttctattcactcaattgtcgcaacagttcatacaacatgaactgtttaaattgctgcccatcgggtcttccgttactgtacgtccagattcggcagaatcatctccacctcggcgtggggacgaggaatcacatggacggatacaagctcgcccacacggcctgccgccgctgctcccgcatcggtggctgcctttaccgctcccacatcgccgcggaccattaccgtcacaagaccgcctcccacatgtaccttgccaatcaaagttacatttgccgccttaaccatggcgtcagccgcttcaatcgaaccaaccagtccctttgtctctaccattcccagtgcctgtaatgctgccataatcttatcctccttgaattttctaatcatgtaacagttcagacagaatgaactgttaccgcattcggcttgcgataacctgcacgctccgcgcacaggccgccgcctttaattaaaatcgctgcgcgatgagccgactgcctgctgccactgccttttcgcacggtccgcacagcaaatgcgcagacctgtctgaacggttacgaatcattctttgttattttatcgttttgcacgcagccgcgcgatgacggcgcgtgtaattgcctcaatgtcttcttccctcaaatcctccatgccgcctgcggcaaaagcgtccgatgctgcaaaagcgccgcgctccgtcccgtcgctgtcttttaaatcggccagctcgcagagaccgtaggccacacggcggatattgatcaggttaagcggtgtaatattgtctgacgtagcactgcctccgactgctccgcagcccagcgtcagtgccggggccagtcctgtcgtggcgccgactccccccaatgcacccggtgtgttgacgagaatgcgcgataccggtttcttcatggcaaaatcccggaccacttcccggttattcgtatgcagggtcatcgtatggccggccccttcattttgcaggatgcggatacacagctcacacgcctcctcccagctctccaccacaaagtatgccagaatcggacagagcttttcacgggaatacggatttttcttgctgacattttccgggtcctggcgcgaaacgagaaggcgtgtcccggccgggatcgaaagccctgccatatcggcaatctgctgcgccgtcttgcccacaatcttcggattcatcgttccatttgcccggagcagaaagccggacagcttctccgactgttcctgtgtcaggaaacaggcgccctggcgcttcagttcctcctccacctgtcccgtaatacagcgttccgtcacaatagactgctctgatgcacagattgtgccgttgtcaaatgtttttgagtccataatacgccggactgccgatgttatatcggccgtatgctcgatataggaaggcccgtttcccggcccgactcccaatgccggattgccggaggaatatgcggcatgaaccatggcctctccccctgtggcaaggatgatgctgacgtcgggatgctttaaaagcgtatccgtcgcttccatcgtcgtcaggctgacacagcccaccgcgccctccggcgctccggcgagctccgcagcttcccggattactttatacgtctccgtaatacagttcttcgccccgggatgagggctgatgatgatggcatttcccgctttaatggagataatactcttatacattgccgttgaggttggattggtggacggaatcagggcggcaacaactcccatcgggacgccgatttcacagattcccctctccttatcctccctcaaaagcccaactgtctttaaatccctgacagactcccaggttatcctgctgcccagagtgtttttcagaaccttatcctcccacctgccaaatccggtttcctgtactgccattttggcaagcctctctgcatgctccatacatgcgtccgctacggatgaacaaatatcatccaatttttcctgcggaaacgttgaaagaatcttctccgcctccttcgcgcgggcaaccagctcccgcacttcctgtatcgattgcaaatcacgatccaatgtcaatttgatcacgtcctttctgttaatatacaagaggcgtccccgccacccggcgcaccgactccgcaaatgcctcgcaggcggcccggcaggcggcctggcttccgcagagcagtccccctgcaaagtttgtctcggtcggggggccgtaataagtcttaagctccacgtcggccgccttcagcgccgcgtccagacctaccgcagcctccagcgggggcgctatcagataggccatggccgttccttcttttacaccggcctgggcggacaggtacgaaccggtccgtgaaatgcagtgggcgaagtataccacggagccgtcctcattggccgtataaaaatgcgcctcattttctatgtaagcaaacgccgcatccaaaccgctgcgcacctcctccggatccggtccggataaaatcccgataaactcaccggccagagcggtgctggcattggcagctcctgcatacatactttttgcgtaagccacggacacatccgcctttttagtcgcctcatccaacgccgcatatgacacatcatcacagtctgtcgtaaaaatccccaggctccggtcgccgggccgcacatccaggtgttcccgcagcgccggatcggcgttcggcagaatgcggacgccaagcacccgcgtgccgacttgtcttgaaaccatgtttcacctccgttacgatttacagcggctgttccggccatactccaaaccggcgcctactttttaagttccaccccgctggcctgtttttccaaaatcagcgccagcagctctacaatataggctcctgcttccactgccgggacaccgtccttatgtatgttggaaacaaccgtccttctcgcctccggcattcccacctttgcatggtaggctatataggcgctcatgctttccgccgtcgccagaccgggacgttcgccgataaacgaacagaccacctttgcccccaccagctccgaaatgcggtcctgcgctcccacgcgtccatatttgacaaatatcggagtaccagtagtcagtcccttttccttcaatccttcctccaccacaggaaggatacgcgccgcattggcctcaatcgcggaggaagaaagtccgtcgctgataataatctgtatatccgggttttggatgcatttttctttaatcagtgcctctgtctcttcgtcaaactccctcccgagatccggtctggtcagaaaaatatttttatcggcacagcgtgtggtgacggcaagcagccccagctgaccggttaattcctcaccgacatccatgagtacggcatccctggccgccgcgtggtcagcgcggagagtcagaagtgtcatagtctttaacctgggtccggaacggcccactccgatacgggctgttgtcttcgtcatcatccgcctcagtgcatccggatcctcgggatgtacgagaagcggaatctttttattcctttccctatcctcaaaagcagagggctgtgttcccggatcctctcctttaccgcctccggccggagccatatcggttcttacttcctccggcacggctccctgtgaactccggtgaatggaacgcctgatatccgcacctgatgcatgggaggatatcataaaatccgttgttggccggcctcctgtcccataaacacaggccgcttgtccggcttcctgcgctccggcacggcttcctgcttccgtcctgtctccggcctgcagttcggaaaggatttcatctgcaatccgctctatttccgtctgtccaagcatatgctcaccgtcctttcctcataaatacagttgggtctccggcttttcccgtcagtcttccattttccataatccccattcgctccagccagcgttcaaatgccggtatgggacgcagaccgagaatttcccggattgtaccgatatcatggtacgcgttcgtctgataattcagcatcacatcgtcgcttgtaggcacgccgagtatataattgactccggcagctcccagaagaagcgccagattttcgatatcgttctgatccgccatcatatgattcgtatagcagcagtcgcagcccatcggcagtcccgacagtttccccataaaatgatcttccaggccggcgcgtatcacctgtttggaatcatacaaatattccggaccgatgaagcccacaaccgtattgaccataaatggatggtagcgccttgcaaatgcatagcaccgggcctccattgtcacctgatccgcattccagtgcgcattggaggaaagctcactcccctggcccgtctcaaaatacattacatttggcccggccgccgtgccatgggtgcgcagaagcgccagagcctcctccaccgtctccgaggagaatccgaacgcgcggttccccttttcacttccggctatagactggaaaatcatatcacagggcgctccctgcctgagggcctctatctgggtcgtgatatggcccagcacacagatttgggtggggatttcaagtgaattcttcacctcatcaaaccgtttcagaacctcagccagactggataccgtgtcatttaccggattcaggcctatcagcacatcgccgcagccgtatgacagcccctcaaacagggatgccgtgattccttccacattatccgtcgtgtggttgggctggagccgcgtgcccatgattccccgctcgccgaccgttgtgttgcagcaggccgtgacgcgtattttctgcgcgccataaatcaaatccagatttgtcatcagcttgcagacagccgcaatcatctcagccgtaagtcctctcgacatgcggcggatcgcgctttcatccgcctcataggacagcagccactcccgcaggtcactgaccgtccagttttggatcctttcgtaaatcctctggttgagcccgtcaatattaattctggtaacttcatcctcctcatagggcgccgcaggattctcgtacaattccttcagcgtcatagccgcaagaacctcctttgcggctatccgttctatatcagactgagccgccacaccggccaggacatcgcccgacttgtgttcccccgcttttgccaggacttcctttaccgaatcaaacacgaaagtctgtcccgatagtattgtcttatatttcatgtttacctccaagttggcttaccgttctctcgtaacagttcagacagcatgaactgttatgttttctctcaaccgaaaatcagcgtcttaacaatcaccggaatgacaagcccgttcatgatagggcggccaaaatcaacaaaattattaaactcggctttcaccgcatccactgccaccagcggccgtttccccgacagcttctgccgtattatctgccccagcgcttttgcaatatcggagcgcaccatcaaaagcagtgggacctccggcaaaagcgcgcggtcaagagcatccgccgtcacggccgccagttttttcagttcctgataatccggatcccttctcccttccattgccagcaccatgcaggccgcatcattctgagccaggaaccattttattttttcatacaggaatttgctgtcaccgccccagcatctctcctcctcactcagcgtaagcttcaggaccggcacgtttttcatcggaaacagcccctccgtataagaaatcgtactgccggaaattgtagttgtgtaatttcccgcaccaatcaccgtagcccggattgtctccgacgcatccagcacccggaatgcctgaaacaggcggccgcgccgcaccgcgtttccgagaagcacaccgatatcgccgtaagcaaacggctcccgccccggctggtagatacagtctgccacacctcccgaaaaacagatgaaccggacagggcggtccgccggaagtttgaacaatgcagagccctgcgtcctgacttcctccagaagcggcgtcggttccgccactcccagcatctgctccagcacctcgatcattttgtcacacagcctattcaatgtctctacagatgccggttccccttttacaagattcagatgacaagcctgcgcaatccgtccggcgctggggctgatataggcaattctccccggctgtcaagagtaacctgacggcctccaatgtccagacagcccctggcccgcacttcgccgccgtcaaacaagacaacattcgtcgtccctccaccgatatccaggttcacgactacagtcccattttcctccgaaaactcccaggctccgcttccctgcccggcaatcacggattccagatccggcccggccgtcgatacgacaaaatcaccggcaaaaccgctcagcagttccagcaccatgcgcgcattttccttgcgcgctgattctcccgttataatgacggcccctgtctcaacctgatttgccgtaattttggctgatgcatactccgtttctatcattttgcggagagcctccccgtcgatgagtgactcgtcaatcagcggcgtgcggtggaccggactttgataaaccacttcctttccgataatcgagacagcgggaaccgaaaaatagccggctgtattttcaaccgtcagccggctgaaaatcacctgtgaagttgatgtcccgatatcaatccccacactgagcatctgggtatgttccatccccactctcctttccttccagaagaaagaatcccgcgagcgagattctccgcctgcagcggatcgcttcggcgggagcactttcccgtaaaaaagcaaaaaaggcccagagtgcggaattatccattcctcactctgagccttattgctgtcacgccataccctgttgtatggtgaaaatatgtagtttgttactggcaattcttccctctgcctgttgaggcggggatatttgcttcttttgttaaattatataacttgggggcgcgatctgtcaatatggagatttactgaggtgtggaggacgcgtccggaacggaccatgtccggtgtggtgagggggatggctgagtcttccgtccccggttgaaggttgtcgtgaggggggaatccggccggaatggattgctgcggggaccgtttgcactctttggagtgcgcatcggagtgctaagctcgaaaagacctcgctaagcaccggcggactcccatgtcccctccgcaattgattccgcctacttccccggatcagtttttcgccagggacggaacactcaggcggaggttttcgacaccggacatggtccgttccgggcgctgattgtctccaaccttaaatggggagggccctgtcgcggccactacgtatttccggcagactgatatcaaatcttccgcaattctataaaaaggcgcatcgaaggcatatcgtatgtttcgtacatggtagcactgagtggtagcgacaaggtccgtccccacacttaacgcgtgagacaatcagcggccgcaggccggcggacggggccaatcccccggcggagtctttcgtcacggcgataaccttcccttggggcggaggggaagataaagtctgcggatgccgttgaaatccatcgctgattggcgaggtcttttcgagcctagcagcgcgatgcatttcacagagcgggagcgtgctccgcagactttatcttcgcccgcagccccaaaccacgacaatctcccccgggacgaaagactcatatacacaccccaccaccccgtccgctggccgtaccggcggcgtcctcacctgcttaactaaatctccagttcatatacatccggccgcctgttctcccacacagccaggttcttcttcgtagtccgcgcatactccagatcaatctcaccgtacacgacgcagttgcgtccctgggccgagctgacagcaattcccctcggatccacaaccatggacattccaaacgggtgatcgtcatgcactgcgccgaactggttgcagacagcaacataggtcagattggtcagagcgcagcttctcaccagcagatcccagtcattggtacgcggcggcaggggctgacccgccgggaactcggaggatacgacgatgatgtcggccccctgaagaaccatagttctggcctgttccggaaaacgcagatcatagcatacctcaaaaccgaccttaccgaagtcaaagtcaaccaggcagagcctgctgcctgcctccacgtaggaggattctttatatccggcggcgtcaaacaggtgaattttatcataaaatcctatctcttccccttccctgttcagcatgatggaatggttgctgacctttccgtctttcgccaccgcggcaaaactgccgggaatcagattcacgtggtactccctggccagctccttcatgcggtcgataaacgggtggggacggctgacatcaatggcaatacgcctggcatcatctttgtcaaccggtgtgtaatagcagtactccggaaatacgattaaatccagttctgctcttgaattttctacagcctgtaaaaacagccgctccatctccgccatattttcttccggtgttccgacgcttcccatctggcaaagtgctacttgtaccatatacttaccctctcttcctctctgctaatccgctttctattccaccttgctcaattctccgatagcccctttgacaccttcttttacaaggcgctccagattcacgaatttatctacatatccgccttctgcgaaattttctctccatctcacttcattggcatccatcgcttttgccgccttcaccagttcctcaaactgatccgccggagcgcagattacgccgtccacatcaccgtacacgatatcgccggggcggaccacacagccgccgcagttgaccggtaccccgtattcgccgtcgagtcccttaaaggtgtttgtcacacaggcgcggcctgtggaaaatacagggaattccattgcccggatggccctggtgtccgtatttggcccatcaactacgattccggccatgcccagtgtctttgcggacaacgccaccatctcaccgaggcaggcgattctcttgtctcccattctgtcgattacgatcatggagcccttgggagcctgtttcatcgcataatagagcattgcattgtcggttccaggaagtcgtattgtaaatgccggtccgatggctttaatgtcatcgctgatcgggtaaatgccggtcatatagcccccctgtacatgatgtccgatctgagccgggtccgttgtaagcgcaatttcaaataattcattctgagtcatgatttttctatcctttcttttaccattcatatttcatttattttattttaattcttttcatgtttgtcacagcatgaacgcagtcatgcaatatgcagcatctcttctctgtcatccccctgccagaagactcataatcgtattcggtacaaaagtcgaaacagccggaatcagggaagtgagtatcagcgcaattcccagcggtatgtacatcggcaccaccgacttgataaccttctccgaaggcacgttggcaacccgcgagaccgcatatatacatagtccgaagggaggcgtgctcagccctatcatcaggttcataaccatcatgacgccgatataaaccgggtccattccgaatccctgggtaatctgcagcacgattggggctgttaaaatcagggcgcagttgctctccatgaacattcccataatcagcagaataatgttgacaatcaggattacagccagcggaatatttgccacagggcccagcagggcgataatcttggccggaaggttctcaagcatcagggcctttgtaaaaatgccgcccgccgtcataatgaccatgatcgagctgaccgatttacatgtctcttttacacatctccagaatccgctccaggtcagcgaacggtggcagattcccaaaagcagcatatagagcacagccatgcctcctgtctcgcccgggctgaagattccggacagcatcgtaatcagaatcaggagaggagcaatggcgattggaagagcgcggaagaacaattcccgaatggagcgttcctctttcatcatcgcttttgccatcggcgggtttaccagcttctttttatcgaccagcagaacgtaaaacagcagcatggccgacatcaggatgccgggccccacgcccccagcagagacttgacgctggaaatctgtgcaatcgtcgcatacagaacgagcggtatactgggcggaaagataggaccaacggtggaggccgcaatcgtaagcgccgctccgtaatccctctcatacccctcctcttccatggaatccacgaaaataggccccaggccgcagacaccggcaatcgcagcgccagacataccggcgaaaataaggcttaatacaactgcgatacgggaagaatatccacgctttccttttgcaagggcgcgggcaaagtcaaatgcccttgccgtctcccccagctcacttaccagatttcccatcaggataaatgcaggaacagccaacagggaaaaggacatagtagactgataaaacgagtaggctaccagtgaaagcgaagtccccgatacaatatagtagataatcgcgggcaggcccatggcgaccacgataggcgctcctacggccagcaggcccacaaatccaatcaggagtagaatcatattcatgctttctgtgccctcctctccttaaatatctcatacaggctgatgcattcctgaataatccacatggcggagccaagtacaatcagataatgcacatagcgtatcgggatatgacacgcggcagtcgtcagtttcatcgtggttggaatcagcagggattcactgtaaataacaaatgcacagtaaataatgcagattgattttccggccacatccatgtaaaactttaatttcggccatatctggaaaagtatttccagctgcaggtgggctccttctttttcgcactgtgccagataacagaaaatcagtccgacaaagcacaactccgcaacctcctcactccaggttgtcgaaaatcccaagaaggagcggcagaaaatctgaatatcaagagccgcaatgataataatgcaccaaatcccgcttatgccgccgataaagtttctaaatgtattccacactttacccaatatagacatattgatttctccttttcatatgaagcagcaatgtgagtctgaactaattaaatttatcattctccgctgcctgagaaatgggggaatccatttctcaaggctgtacggcacggatcaggtccggcatatctccccagtcctcggcaaaatagtcatagacattctctgcggctgccttgaatccgtctatatcaagtccgttctccgcatcaatgatctccattccattgtcttcacagattttcttgtattcttccaccttatcaagaatgtacttgtccatataggccgaagcgtcataagccgcttttaataccgcctcctgctgttccggcgtcaggctttcataggtattcctgttcatccagagcccatggtttgtcggcagatgatttgtctccatacaatacttctgcacctcgtataatgcgctgctgacgattacggaataaggattctcctgaccgtcaattacattcgtaatcagggctgtcggcacctctgagaatgccatcggcgtagccgccgcgccgaatgcggtaaataactgctggtataagtcggaaggaaccactcggatcttagcgcccttcatatcactcagattccggatcgggaagttacaggttatctggcggtagccggagttgaagctgctgagcagcataacaccgtcgtccttcaatgcctcgttaatcaccttcagcggttccgagttaaaggggtcaaacacggcaagcctgtgatccgcatccctgtaaatatacggtgcgtcgaaggctcccagacggctgtccaaatctcccgcggatgacgggacatactggataaaatcacatatccccgcctgcaaaggctgaatatcgtagccgcacagcgtgttattgaaatacagctccacctcgatgtggcctttcgtatattccttcaccagatccgcgaatttctgctcccacattccggccggggaatcctccgcattctgatccgtaaatttcaatactttatcaggcgtagtaacttcctctgtcccgccccctgcaggtgcagccgcagccgtcgcatctgctttcggagcgctccccctccgctgcttccgcatccggccagtaaactccccagcattgctacagtaagtgttaatgctaaacctctcctcatacctcttcctacctttcttttgttaaatatcacgggagcgctctcactatctccctgttatagccggaaaaccgctgctcacatcctgtccggatgcccggtactgcaaatccccgcgccggaatatttctttcgtttcatctcgtttttggagtacggtactcggtataccaaaaatatcgcaaataaaagaagaaacagctcgtttccgtttgtagacattatatactaaaaaactatatttttctacaaaagtttcagaaaatagctgttttctccattttagacaaaatattctattcaattttagttacttttaataaactcctctttaatttccgcatcgccatcctgcgggtcgaagttcaggcgttccggtattacaagaaggcgtttcttccaggagccataatggatatggagcagttctttgcccttttccaaatcgccttcctccacgctttgcaggattccgatatggtcggcagcgaaattccgccctccatgcatgctgtatttcatacttaacacagatgaacggaccactttctcactgatgctgtcctgaatctttattaactggctgttgccggtaatcagggcaaagtaattgtggaagctggtatccatcttcatcagcgtataataatcatttgcattatggaccgcaaaaatatccatttcctcgataattttccgtaaatggccgatatgttccggcgtcactttaggaaatgcaagctcaaagcagagaatatccaaaggctcacggatttcaaataattccagaatgtctttccacataagaaccgcgattttacggttctttccaacctgttcaatccatccctcattctccagcagacgaagcgcgtcacgcagcggtgtcctgctgacatccagaagttttgagtactccctctcattaatgatcgtaccgggctttatctggccggtgataatcagaagcttcagctgattgtatattttagagctgtataactcatttttttcaattctctcgatctttgtgtctattccgggcaacataatcgctctctttcttcatttgtttacaatattatttcgattatactattctctggttccgcttgtcaattaacggaaatcgaaagtaacggaagttccctccctgtccgacgtcagatagagtttaccgcccagcttgtcacggaccgtcattttgaccagcgacatgccgaagcccaggccctctttgccgttaaagtcaaagccgtttccattgtcctgtacggtgatggaggaaaacagctccccttttttcagaatcacgcgtacctgcccccctgttaatcctgtaaacgcatgcttaaaggcatttgagaccagttcattcactaccagtgcaatatcggttgccttctcctgatccgccgtcaggtcatctccttcaagcaggagcttgacggatgcttcattatcatagagctgtgtcagattctgcctgagcttttcaaggaacggtttcagggcgaccggcccgccttctccgtaagccagaagctcattgatggatgcaatgctcagcacgcgcgccgtattttccctgaatgcctgctttacttcctcactttccgtgttgcgtgcctggatattcatgatgcttgcgataagctgaagatgatttttcacgcggtggtgaacctcccggcgggccgcatcctccggagacacatggatgaaatctcctttttctgcacggcggaccagcgcctcgtacttctgctcctgtcttatgtcgtcgctgatgtccctctcgcctatcagcacgcctatcagacggccgtcatcgtcggatatgggaacaacatcctggcgtacggtgcgttcttcctgtgttactgccctgatatcgcgcaccggtgatttcgtctccatagcgcggtaaacagccggctcatcctcccgctttgcatagcagccgactacacggctcctgtatgccgaaggcatatgccccggtccggcctgggctgcaacaaacatccggccgtccggctcctgcatacagtcgatgaataaatccgccccggccagatcagccatcagcggcagaacggactcaatccggctgagcttgtccacggctgaatcactcagccttgcccggctttttatctcatccctgttcatgtcatccctcctgctccaaaagccggctggctgcttcacggatggaaatcttttgtctggcagcctcctgcgacagcagccggtacgcctcaggttccgtcagctttctctgcttcatcagcagctcctttgcacgcaccgccgtatcgcgtttaatctcacggctcagaattgcccccgcaattaccgccagcggtactcgtttctgcatggctgctttctgcatctcacggtatgcatccgactcggaaatctgcttttctttggccagttttcccttggcctgttcaatcaccttattctccttcagtttccggcaggcatccgccgcctccgcccgggtttgctgcagaagccgtccctgggccagcgctacctcaagtgttggcttcagcatcctcggttcaatcggtttaacgagataaccggcaacgcccgcgcggccggccctctgaataaattcttcatctgcgaacgccgtacagatcacgacgcagccggccagcccctccccaataatcgtctcggcagccgtcatcccgtcaaaaatcggcatttccagatccagtagtacgatatccggatgcttctgcctgcacagctcgacggcgtcaaacccatccgcaccctcggctgcaactgcaaagcccagttcttccagcatctggcacaaatccaggcggattatcggctcatcgtccactactataattgtacgctccatttcccctcatccccattcgcagtcttcccgacttattactaatctgattatatcgttgtttttcattggttgtcaattagttacggcggcggcaatacagcttgacttaagttctattttgaactacaatatttatgttcaaaatagaacttaaaaggaggatttacagatgcagctgtcattctgggatttatattccctgttcgataaagaatacaattctgtaataaaagaagcggcggaaaaaacaggtttaacgatgaatgaactcggtgttctgctttttttatccaataatccgtctgccaaaacagccagtgacataatccggattaaaagagccacaaagtcgcatgtatctttggcagttaaagagctgaccaaaaaggggtacctgacccagcaccctgaaaagggaagaaatatccgccttgaggtcaccccccgggccgaacctcttgttgcggttggaagacaaaagcagagggacttcctaaatcaaatctgccggggtttttcggacaccgaaatagcggcgctgaagacgtgctttgaacggatcgcagcgaatctggaacaaaaaaatacgaatgaagaaattccgaagggagaaaactgcgaatatggcgtcaaatgatatatttgaaaaagaatctgtatcctcggcaatcattaagctggctatccctactattgtaagctcccttgtcactgttatctataacctggccgacacctattttgtaggcctgctcaatgatcctgtccaaacagcggccgtcacactggccgctcctgcgcttctcgcattcaacgctatcaataatctgttcggcgtcggaacttcaagcgccatgagccgcgctctggggcgcggtgattccaatctggtccgacgttgctccgtatttggattatactgcgcattcataagttcagtcttattttccgtttttaccgggttgttcaggactccgctgctcggacttctcggcgcatcagcaaaaaatgcggcggcgacctccgaatatatgagatgggcagttacctgcggagccgtcccctccatcctcaatgttgtatttgcttttctcgtgaggtctgaaggttcttctctccatgcgagtatcggaaccatgagcgggtgtattttaaatatcattctggatcccatttttatcatgccgtggggatttaatatgggggcggccggagccggtcttgcaaccttcctctctaactgcgttgcatgtctgtactttttggtcttgctttatatcaaacggcggaccacctgcatatgccttaatcctaaaaagttttctttcgatcggacaatcgcagccgacatattcggtgtcggtatcccggcggcaatacaaaatctgctgaacgtcacgagtatgacggtttacaataattctgccgcagcatatggttcggaggttgtagctgctatgggaatcgtacagaaaatccagatggtcccgatgcaggtcaccctgggcgcagtacagggcatcatgccgttcgtaggctacaattttgcgaaccataattatgaacggatgagaaaatctatcctgtatcttctgaaacggatgattttgctgatggttgtcattgtgattgccggcagcattttttccggcagcctggtcggcttatttatcaagacagacaccgtggttcattacggcgccgcactcctgcccggctttcttcttgcactgccttttatgtgtgtcgattatatgtgcgtcagtgtttttcaggctataggagacggtaaaaaatctttctatctcgcattcctgagaaagatcgtgctggaaatccccgcactcgtgctgctgaattattttgtaccgctgtacggaatgtcctatgccactctgtgtacggaagtcattctggcggttttatcggttaagcttctgcacaaggttattaaattaaaatagaccgatcttacataagaatcctcaataaagaccagacaggtgccggaaatgacacactgcctggtcttttaaaatttactcatatttatatctgtctggttcctctgcaataagtctgaagcacgtcatactcattgctgagcactacaatatccgcatcatatccggccgacaattttccttttctgtcatccaccctgaggcatctggccgggttgattgtacaggcgcctagggctgcgtcaaagggcactaaggcattctccaccagtatcttcagacctatgttcatcttcagcgtactgccggcgattgttcccgactccttcagcctcgccaggccgtccttgccgacctcaattgcatggccgcccagatcatagcgtccgcccggttcacatgatttcacgcgtaaagaatccgtcaccatgatggcaaaatccctgcctttcgccgtaaagtaattatttaacgccgcaaggtgggaatggcagccgtcacagataatttcaccgtaaatatcgcggatgcgcagggccgctcccaccaggcccggagccctgtggctaaacggtgtcatcccgttataaacatgggtcatcgaggaagctccgttggcgacagccagaagcgcctgatcataggtcgcagaggaatgccccaggctgaccaccacgccggcctttccgcagtactttgtcagcgacaggccctcgtcatgctcaggcgcaagagtgatatagcgtatcatcccctttgccgccttctggtattcctggaactgggccacggatggcggcgcgatcgcctccggcggctgggcgcccttgtaatccatatcgagatagggcccttcaaagtgaactcccagaatttcagctccctcatagccctcttccatcacttccgccacattcttgagagcggctgtgagtacgtccggcatctgggttaccgtagtcggcagaagcgacgtcactccctcctccggcacccgttttatccagttccggagtccctcaggttcgccgtcatttgtatcaaatccataggcgccgtgggtgtgaacgtctataaagcccgggacaatccggtatgaaccgtagtcctcatctgcttctttttctccatacggcaggaccgcctggatcatgccggactgaatttccagctgcagcggcacaaactgccctgccatccagactctttcactttgtattaccatatccttgcctcctgtattctgtcattatatgtaacagttcagacagcatggactgttacggcaaccggtgcgcagacctgtctgaactcattatattactattctttacttccagtcaaagttcctaagatggccttccatcgtcatctgttcaaatccgttctgtctgagggcctcataaaggataactgccactgagttcgaaagattcagtgaacgtgtctccccccacatcgggattctcacacatgtctcctggttttccaccagtatttcctccgggattccccggctctcttaatctccctgtcactgagacggaatcccagcggctcaatcagatggagcttcgttttggtcgccacacagcttctgccgatattgcccgtattcatcggcatttcaggttcatataaaacaatattcacaattacttagccgcctttccatccagcctgtccacgaaccgccggatccgcgagatggctttctgaaggtcttccagagaataggcataagacacgcgcagatatccttccccgctgtcgccaaaggcagtgcccgggacgattgcaatcttttcttcctgaagaagtctgtttgcaaattcatcggaactcatgccgaagcgtttgatacacgggaatatataaaatgcgccgtacggctcaaaacagtccatgcccagttctgcgaacgcacgcatcaggtactttcttctctcgttatatgccttcttcattctggcaatatcctcatcaccgttcttgagcgcttccacagccgcatactggctggtcgtcggggcacacatgatggcaaactggtgaatcttcagcatctgggtgagaattatctccggcgcggccgcataaccgattctccatccggtcatcgcataggcctttgaaaagccgttaatcaggacggtgcgctcccgcatgccaggaattgcagctatggaaacgtgttcgcccttataggtcagctccgcatataattcgtcgctgatcacgaaaatatccttttcctcaattactttggctatctcctccaaatcttcccgctccatgatggcgcccgtcgggttgttcgggaacggaagaatcagaaccttcgtgttgggagtaatcttctccagcagcttttcttttgtaagcttaaactgatccttttcctccagctcgataatcaccggcttaccgcctgccagtacggcgcagggaacataggatacgtagctcggctgcgggattagaacctcctctcccggattcagcatcgcgcgcagcgcaatatcaatggcctcgctgccgcctacggtcacgaggatttcggtattatagtcataatctatatgcatgcggcgtttcaggtatttgccaatctcctgttttaattccttgagtccggcattggacgtatagaaggtgcgtcccttttccagggagtagattccctcctcgcggacgtgccacggagtgtcaaaatccggctctcccacgcccagggagattgctcccttcatctcactgacaacatcaaaaaatttacgtattccggaaggcggaatatccactattatatctgataaggggtttctcacggtacaatcatcatcctttcatcctgcgggccgtcacagagtacggttccatggtctttatattttttaagtacaaaatgggtggccgtactgagaacagagtctatcgtagacaatttttcagatacaaactgagccaccgccctcatggtcttcgcctccagcataacggtaaaatcataaccgccggacatcagatatactgatttcacttcactgtactggtagattctctctgcgatcttgtcaaatcccatttcacgctgaggcgttaccttcacctcgatgagagcaatcactttttcttcatctgtattatcccaattaatcagtgtatggtaaccacagatgacatgttcactctccatctcagcgatctcggccgcgaccgcggcttcattctcacctaataaatccgccagctctttaacgctgattttgctgttcttttcaatgaccgctaaaattctctctctcatagtttacctcctgttagttgggctttaatctgtcacgttacactttaaccgcgcgttctgcacggctgtgaacagtaacctttatatagttcatcgggtttggggcggtccaggaatgttcttatcccgccgttcagtatctggcgtttaattcctgactgcgttttcccgagtactaccgcatgaatatcctgtttctcaagctcccttaccagtgcgccgccgtttgcggccgtaaggagagcgcatccttccgattgcagcctgtaaggatttacatcaaacacctcgcagacttctaccgtctcctggagtaacggaagcttccgcagctccatctcaaaccccaggccaaattcgtcaaaataatcccacagggccgccataatgccgccctctccggcaaagcaccaggacacagccccggcattacggaaaatcccggctccttccgaagcagaaagaccggggagctttaacagtccccgggtttcgtataggttctggcagcgccttacaaattgcggcgtaaagcgctgcagcagttctttttctctttgtgttgcaacggccgatgtaccttttaacgctatgtaccctgccgccaccaaatcctgtccggcttccatcaggccggatgcagtaatgactctctccctcataatcaggctccggcctccgcgccgcccggaacaggcgcgggatctgccggcgcggcaggcgcttccggtgcggcaggcgcagccggtgcttccggaacaggcgccggtgccgtcggaggtgcaatctccgatgcagggccgtcggaggcagggccggaaggtactgcaggctgagtttccgcaggcgcagccggctgttccggcggtaagacaggcgctacggcaggcagttccggtccgacacggtaaatagccttggacgccatataggtgtctgtgtggaggatttctttttccgtctccacaccgtcaacatacacatatttccacaatctggaacgcaggcctctgtgggccgactgctcgaggactttagctccaggtctgagagacggatctaccttgatagtcggcgctcccggatcggatgctcccagtgtctcggatacatacttcacttcccggttcgccggccttgtctcttttccatagattgtaaatgtcaaagtacctccgctgacagctccttcaatgtatataggcgcatcatacggattcttaaatttcaagtctttgattgtaccggcgatggccgcatcctgggacggttttacataccccaccaccattgagtggttctgtctctgcgttatctccatctccgcctgaagcgccgcgttatacatcgtggtgcataactggcaggctcctcctccaatcgtatcgaccacacgcccgttctcataagaccccgccgccgcgtatccgtttgcaattgtaaacggcgtcagataaacataagccgaaaattcttcgcccggcatcagcacacagccgtttacctttgaggcgccattggtcaggtttttggaacgcgatatattgcctgtactgaagttcgtgctgaaggttccaagcacatcctgaatcatagccagatcttccgattttctcgccggctgcgcctcggccactaccgccgctatcgtcacaggctccttcagcccgccttttaatgcctcatccagcgctttcttagtggcatctatgtccacatccagacccactacagactctgtaatctggaatgcattattcactcttgtaatttcagcatccttcgcttctcttataaaggcgctgcatttgctctcaacaaactgcgccactttcgctgcatctacggatgtctccacatccagcttcagcggctccttctcgagggtctttaaattcagataacgttccagcaaattgcctcctgcatatctgtccgccgtttcttcgatctcttcctgattggtccaggtaaatcccagttcttttgccgtggtggtaatctcatttccgtcaatcgtcagtgtaatctcctggtttgacatgtcctccacgtattgctcaatcttctgatctgcttcctccccggtcattccggtaaggtcaacacctccaaccgtgattcctgccggaagtgtacctgcttccacagcttccggaggaaccagaagtattccggcagccagtacacaggcagcggcgccggcaacccaaaatttctttttcatatatatgcccctattcaaataacgtaattatggcgcttttctgcgccctgtcaaagccggcggtttacatcgccatagataaacctgcaagcactgttccaccaaccatcgccagtacaataacgataataacgactgatgaaattacttttcttgtcttcttatcactgaaattaaacattcctatcacctctttttattcttccatactgtagtatgattttatccgtcaatctcgaaatttcattccgggaaagataatcgatctgcacagatacgtttattctatgatattttagtaaatcccgcaagacttctttttgcttttttgacgccggctgctctttttttactttatataccagcggtttacatcgaaacgcctccggtgccgacgaaaaatggctccttttgacattccggtacagaaggtgcgccgtcagcgcatccgccagcgccctgtgggcgtcggtctgcttaattccgtaataacggctggcattttccaggtttttcttttcttcctccggcataaacctgcggcagagtgtcagggtatcaatccctgatttttcaaaaaccagccccttattcaccgccgcccgtttcaagaaactgtaatcaaaaataatatgatgtcccagaagaggcagatcccggcaaaattcaacaacccggccaattacatccccaatgtccggggcaccggccgtcatctctccggtaattcccgtcaactcccggatacggccgtccagttccctcctggggttgacaaaggtggaaaatgtctcttttatctctccgtcaattactaaaaccgcacctatctcgataattttatcgtgcttcggatccagccctgttgtctctaaatcgattgccacgtatgaatcgtcttccttttcctgagcggttccccgcctgctcgtttctacctttattatgtgtgcagtttcttccatttttattcctgctttctccaataatccgaaattttcttacgttatttccttttttccgccccaggacaattttctctaaggaaacactccccgcatttaggacttctggcaatacagatacttcttcccagcgtaataatctggatattccagagtatccagtgttctttcggtaacaccttcatcaaatcatattcgatcttttccgggtcctcctcttttgtcagccccagcttcctggaaatccgcttcacatgggtgtccacgacaatactcggctcattatagatattgccccgtataacattcgcagtctttcggcccactccggccagggacgtcagttcttcgagcgtccggggcacttcgccgccgaaattttccaccagtgacttacagcaggctatgatgttctttgctttcatatgatagaaaccggttgaatggatgtctttttcaagctccttcaaatcagcatttgcaaatttctccagtgtatcatattttttaaaaagatccgcggtcacgatgttgaccctggcatcggtgcattgggcgctcatgatcaccgctatcagaagctgccatggtgtctcatggttcaggtagcagcggtaatccgtaccgtattcttcatcgagaagggccaaaatccgattgacccgctcatccctctgcgcttttgtctctctctgcatctctttcctcctcttgctgtcttccttaagtgagccgctcgcttcccaccagctctcccccgctgagaatcagcctgaacgcccgggcattgccaaacagggcatccctgttcctgtagtcaaacagaatcacactttgatccctcatcccctccgcgtgagccatcttgcttatctggcgtgaatcataatcttcgtaaccctccagaagcgaaggcattttggcctctttaataaagaactgtttcacagcctctttaaagggcgcttgttccctggcaaaggaaggacggctcttggcattttccctcaggtaaagatcatacatcagcaggtcgcggtaaagctcccttttttcttcctcccgtcccttcagaacggtttcattgataaaccggtatagaatttcataccgcgccagtcggctgtggctgatcccggtaatccggttcccgtcatagtaaccggccagctcccggtataaatcaaagggcgtatcaaattcctttaccagctccttcagaacgtttctgaactgcccgctgttataatgaacctccaccatctcttccacgcccttaagccgtatgatatcatcgtaacccagccatctggtggagagcacctcatagggaggctgtgatttataaagcagaccgtattccccggccatttcttccatgtaagagcccttcagtaccttcaaaaaaccaagctgaagctgctccggttccattcggtatacatcgttaaatgactttctgaagctttcatatccctcatagggcagcccggcgattaaatccaggtgctgatggatattcctgaaactgtttacagcatgcacattgcgttccagcttttccaaatccatccttctcctgatctcgcgtatggcttcggggttcgtcgtctggactccgatttcaagctggatcaggccgggtctcatctgtttcagcaaagccagttcctcctcttccagaaggtcagccgatatctcaaagtgaaagttcgtcaccccgttatcatgctccaggatgaacttccaaatctccatcgcgtggctcttcctgcagttaaaggttctgtccacgaatttcacctgcgggacacgcttttccagaaaaaaagacagttccttctttaccatgtccaaatcgcggaaacgcacggttttgtcgattgaggaaagacagtaagagcaggaaaaggggcagcctctgctgctctcataatagataatccgatgcgccagcccctcaagactcccataggagaaaggaatccggctgagctccatcagcggagccggtgcgcctgccgatattgtcccgtcactttttctgaaaataaatcccggcctgtccttcagcagttcctccaggcgggaatggttccatctctttcccgcctcttttctttccatgaacgacatgccgcagctttcaaccagccggaagaatgtctcttccccttcgccggccatgactcccgtcacctccggcagctctctgagcatttcttccccgttatatgacacctccggtccgccaagccatatggtaagctgcggcatcaccttttttaaatcccttacaagttcctttacataaagaatattccagatatagcaggaaaatcccgctacatctggactgcgtctgtaaatatcctgtaataccaaatccatctgttggtttatcgtatattcccccatttcaatctgaatccccggaaacgcttccccctgcgccctcctggtctcaagcttttcctgagcatatttattcaggctgtagattcccagattggaatggatatattttgcattgactgccgccagtaaaaatttcatcttataatgaaacctctatctttcttcccgtttggttatactggtaatatctgaccccggctgaatccagcatccgtttcgatgcacgcaccgacggtgttgcgccgtatttgtcgctgtcgtatatcagcgtcttgattccggcctgaatgatggccttcgcgcactcattgcaggggaacagcgttacatacagcttactgccctccaggctgccgccccggtaattcaggatcgcattgagttcactgtgtgtcgtataaaaatatttggcattgtatgggtcctccgtctccagctcttttccccacggaaattcgtcgtcggagcatcccttcggaaagccgttatatcccatggacaatatcttattatcaccgctgacgatacaggcccccacctgcgtgctcggatctttagagcgcatggctgaaagctttgccactcccataaagtactcatcccaggtaatataatcatttctcttttcagacatatggagccctccccgtatcttaacctgtttttcttccactgtaaccgtcctcctacactttttgtattctatatccggccgctttgctcagccggttcataattgcctgtcccagatggtcctccggaaatccctccgaataaatatactgtgcgcccaaatcgtcaaattcgcgcagaagggcatacagattatgtgctaccgtctcttcctttgcccgctccccaatacttctcacaaggcctccgccatagcattcccgcgtttcatcggtgcagatgatccctactttatatccttctttcagcttttcggccgccagcctgttgatttcacaaaccaccttttcctcttccccttcaaccagggtcagatcggcgtttggggcatagtgccggtatttcattccgggagcttttggctttaagccggggctgaccggccccaggatagccggatcaatccgtacctctcccaccgcctcgtgaagcatctccatagttaccgcgcccggcctcagcataaccggtatctcctccgtcacatcgacgatcgtggattccacgccgatgcccacagggccgccgtccagaatcatctcaatccggccgttcatatcctgaaagacatgctccgccctggtggggctgggacgtcccgacgtattggcgctcggagccgccacaggtacgccggccaggcggatcagctccctcgccaccggatcagacggcatcctcacagccaccgtatccagtcctcccgtcgtccccaggggaaccagatcactttttggaaaaataagtgtcatcggtcccggccaaaacgctttggccagctttattccattctccggtatccggcttaccaagggcctgagaccctcaaaatccgccacatgggctatcaggggattatctgacggccttcctttcgcctcatatatcttcctggccgccttttcatccagggcattggcccccagaccatacaccgtctctgtgggaaaggcaaccagacctccgttttttaatatttccgccgcttcctcgaggtatttcttctcttttgcggtaaaattcccttcatctgacacttttaatactttagtatccacttctgcgtcttctttctatattaatgtataatcgtaacagttcagacagtatgagctgttatgtataatcttcattttcgttttttatcatagcacacgcctgtgaccggcgcaagagctctttgagcctctcaccagattctcgttatagagatttagttaagcaggtgaggacgccgccggtacggccagcggacggggcggtgggtggggttatgagtctttcgtctcggggaagattgttgtggtatggggctgcgggcgaagataaagtctgcggagcacactcccgctctgtgaaatgcatcgcgctgctaagctcgacaggacctcgctaatcagcgatggatttcaacggcatccgcagactttatcttcccctccgccccaaggccaggttttcgccgggacgaaagactccgccgggggtatcggccctgtccgccggcctgcggccgctgattgtctcacgcgttaagtgcgggggcggaccttgtcgcggccactcagtgctaccgtgtacgggaaatacgatatgccttcattgcgcctttataaaaggcgctagatttggtatctgcctgcggaaacacgtagtggccgcgacagggccctccccatttaaggttggagacaatcagcgcccggaacggatcatgtccggtgtgcgaaaaacttcgcctgagtcttccgttcccggcgataacctgccccggggaagtaggcggaatcaattgcggaggggacatgggagtccgccggtgcttagcgaggtccctcacgagcttagcactgttgcgcactccaaagagtgcaaacggtccccgcagcaattcattccggccggattccccctcacgaccactttcaaccggggacggaagactcagccatccccctcaccacaccggacatggtccgttccggacgcgtcctcccaacctcagttaaatctccatttcaaaatcggcatgaaccctgattctgcgaatatactttttataaccgtaattgatttcaggtgaaaatgtgttaaaacggattgtaaaacggctcacagtggaagcggcagccggatttgtcctgctgaccggggtatttatgatgacgcggtacgccggactgtcggtgtccggaaccagtgtacatattggaaaagaaaaaccggtagtcgtcctggatgccggccacggcggaaatgatccgggtaaagtcggtgtggacggcagcctggaaaaggatatcaacctggcgattacactgaaacttaaggaatatctggaacagtccgatgtggaggtaatcctgacaagggacgacgacaagggcctctataagtccagtgacagcagcaaaaaaatggccgatatgaaacagcgctgtcagacaattgcagagacggatccagatatcgtcgtaagcgtccatcaaaacagctaccatcaggaagcaatatccggcggtcaggtattttactataagggttcggaaaagggtaagaagctggccgaaaaaatacagaaaaggtttgattatgttcttggtgaaaaaaatacaagacttgccaaggcgaatgacaactactatctcctcctgcatgtgaaatgccccatcgtgattgtggaatgcggctttctgagcaactggagtgagtcaaagatgctgaattcggaggattaccaggatcgggtggcatggacgatacatatgggaattatggagtatttaaaccagcggtagactgtctgtatcagagaaaaacggttcccgggattttcttcctgaggcggcccgctgcagcggcagaaaattcatgccgctgcagcgcggagtctgccggggcatgaattttcttctgattaccggagcctctcaaccgcctctatcgctgaaacgcaccgcgtgacagcctgctccagttcatcctcattgataattaacggaggattaaaataaagcacattgccgagaggccggagaatcagcccgcgctccagagcttttttatacacctggtagcctaccctctcttccgggggatagcccttcttcgaagctttgtcctccaccagctccagcgcatgaatcagccctatatggcgtatctcaccgacatgaggatgagagccaagacgttccgccagcttttcagtcaggaaggaggcccttttttcagccttttccagaacccggtccttttgaagaatggagagaaccgccagaccggccgagcatccaagaggattgccgctataggtgtggctgtgcataaatgcttttccctcgttatagtcggcatagaatgcctcatatatctgctctgtcgtaatggtgatagccatcggcatatagccgcctgtcagccctttggatatgcacatgatgtccgggctgacaccggcatgctcgaaagcgaacatttttcctgtcctgccaaacccggtagctatctcgtccgctatcagcaggattcccgactcatcacagagctttctgagtttttggaggtaaaccggaggataaatcctcatgccggcgcttccctggagcagaggctcaacaatgatcgcgcatgtctcctttccgtaccgttcaaatgccgtttctgcctcagcaaagcattccgcctgacagcagtccctgcatttgccataaggacagcggtagcaatccggcgcttttatctgaatagtatccatcagcatcggtttatagattctcgcatacaaatccatgctcccgaccgataaagccccgattgtctctccatgatatccttctgaaaggcacataaaccgctgccgtttgggatggcctgtctgatactgatattgaaaactcattttcagggcacactcgacggcagccgaaccgttatcggaaaagttgaaccgggtcagacctgccgggatcaccttcacaagctcttcacacagttttatcgcaggttcgtgggtaaagtttgaaaatattacatgctccagccggtcgagctgactctttaccgctccgtttatctccggattacagtgccccagcagattacaccaccaggaactgacgatatctatgtactctttcccatatatatcatagagatggacgccttctcccctgtctataacaataggttttaacgtttcataatccttcatttgggagcatgggtgccagatatgctttaaatccctctcctctaatgtcatttgccctgccattatttccattcctctcttttctcagactgtctcccgtatagagcagctaaaaatccggcatcggtatccagctccttgctgccttccccgacacatgcaataaccgggattttggtcaattcttccaccatttttttattatcctcttccattctgcttccgatatgacagcggttgagtattattccctttacttccaaattcctgtttctcatatattctgccgtcaggactgtggcattgatagttccaagccctgcgtccgctacaatgacggagggaaggttcagttccctgatcaggtcttccagaaatatcttaacttcaccgctctttggcccgtcataccgtattggacagacaattcctccgctgccttccatagtaaggtaatcgtactgctttgccgcacggaggaagccatcgacgaccgttttcatttccaccgggtttccttcaatctgtgcggcgagatgaggagaaacagcattttcataaatatagggcaccatctctttagccgacgccccaagctctgtctccctgttaacataatctgcgtcacctggtatcaggctgccgcccactcttaccgcgccgcttagagccgctttataataccctgcattataaccggcctgcctgagtttctttatcagcaggcccgtcacatatgtctttcctacgtcagtccccgttgctgttataaataatcctccgcctgcctgttgaccgttcttctgttgtctgtccatctgttgtctgtccatctgttgtcagctcctctcctgtctattcttttaaaccggccgttgcctgtttcccgttccttctcacttcaataccgagaaccgggataatccgtctgccgagagccgcccccagtatgcacagggcaatgtcccccggtacagccagcagaaaacagtagagaaacagcggccagattcctatcggcgaatcgattacataatttccaatcacatagtaatacaccatgccgaacagatataccacaaacaggcctgcgaagtttgcggcaagaagcctgccaaagcccggctttcttccgcctttttccgcaatcgcgcctgtcacccaggctcctgcgcaaaaacctatcagatagccgaagctgggcctgaacagatatccaaggcctcccccctctgcaaaaatgggcaggcctgcaagtccaagcgccacatagacggcaacactaagcgcccccagacgtttgcccagcagcaatcccgccattgtggtaaaaaggaactggagcgtaaagggaactaccggaaccggaatcttgataaaggctcccaccgccgtaagtgtggtaaaaagggcacagaccgtcatgtctcttacgtttaatttctgtctcatacatcctcctctattgactgtgtgatgaattaaatatacctgtgcaggtctcaattgtcaacctatttttatttttagttaacattagagtcagacaaacctgtacgtccgtatttattcctgtggtaattacgcagtgcgctccctgctgccctgctgttaaagaaaaaaataccgggaaaaagcggccttccggctgctgcttcccggtattttattgacgacaacctgtgcgcagagcgtgcaggttatcgtttgaagacggtggcctttgcacggcgcatgcaggttatcattgcaccgcgtcagagaaatccttaaatcccagtccaattacctccgttgtctctgtcaccatgacaaatgcattttcatctgtttcgtggataattcttttaagccttgcaaattccgactttctgaccgtacaaagtacaaccgaagtctcccggccgctgtaagctccctttcccggcagtattgttgcgctccgatccagctcccttatgattctcccggcaatttcatcgggatgtgcggtgataatcgacgccttgcttcccgcatcgctcccgtaaataatcgtatcaatcacctttgtctgggcatacaggctgatcatgccgaacagggctgcgtccacattgcggaaaacaaaaattgaaagggacaggataatcccgtctatgatcaggagagcacgcccgatttggacatggggatattttttctgaaacaggtatccggccacatcgcttcctccggtagttgatccggacaaaaagataaatgccattccaatccccaccagtattccgccgtagaggctgctcatcatccggtctcccgcataaaccggacagattggcgccaccacgtaatccagaataatggaacaaataccgcaggccaccgccgtccgaagcgcgaatcggcggcttagataaaaccaggccagaaccagcagcggcaggttcaccagaagcgtcatcctgcccaccggcaggccggtgacataattcatcatcagggcgatacccactgctccgcccggcgcaatattggccggcacgataaagctctgggtcccgacactgtatatcaatgcccctatcaccagaagcagcatatctcttactgattctttgttaatccttccactcatttttatgcctttcttcccggcaaaccaatctttccgaaggcatttacaaaaggattccgtattgttttacctttctttgaagggtctgcctgggcacgtctaaaattttagcagcctccgaaatattgcccgccgtgacggccattgttctggctataatgcccctctcgtattcgccgacggcatctctcaaagacggacagagggtatctccctcctccgcttcttttttcacactgctcttcatttcgcaaaacttatcttcgatatcttcgaacttcagcatattgctgttttccccgaccatactcattccgtatacgataatatgctccagctcacggacgttgccgggccagtcgtattcttccagtcttgctaacagttcttttgaaacatactgtacatttttattaaatgtaacattatgcttgtttacataaaatttaacaaaatgggcgatatccttcttcctctccctcaaaggcggaatcgtaatggacatcatgctcagcctgtaataaatatcacggcgcagctgcccctcttcaattgccttcaaaggttctgtgttaatcgctgcgatgattttcacatctacggattttgcttcccttgcccccaggctcctgaagtgaccgtcctgaagaacacggagcagcttcgactggagatgaatcggcatcgagttgatttcatccagaaaaagcgtcccgccgtcagccaattcgaataagcccttattttccgtggccccggtaaaagctcctttggaggttccaaaaagaatactctcaagaagcgtatccggcagggcggcgcagttctgggcaataaaaggcttatcccttcttgcgctcgtattgtggattgcctgggcaaacacttccttgcccgtccccgtctcgccgcatatcatgacaggcagatcacaggcggccacaacgcttatgtactcccttgctttcttcattttctcgtctacggcaatgatatccgctattgtaaagaaagccgtgttccggttgaccagctttcctgagctgctgacgggaaaactggaatagcttaattccacccgctccgaattctgttccagctcttcctccgactcctgcatggacagatcaatggctcccacaatctgttttccgctcttgatagggatggacagggaggtgatccggatttcctccttgccctgggccttcagaagctggttctcaatatagaccggaagtcccagttccatagctttgatggtagtgcttgtcttcggatccagattctcatatacatctaaaaatttctgtcccaccagctcatatggttcctcctggctggagagcttgttgttcagtttggctgtgaacaggatctccccctccaggttgataattgtaatgccgtcaatataaccttttccgtggaacagtttcttcattaattccattatcccgccccctctttcaccatttctctgcaccgccgtatcctatagaacggcagcataagtataaagaaatagtatcaaagattgcaagggattacaatacgtcagattgttactattcacagccccgctgaaaaacgcggttctacgaacagtaacacgcttcgcgatgcacagaaacggtaaaaactccgtttcgcgccgtataactcgggattttcactcaaaatgcgagtgaaaacgcctcgcggaatagcggctgtgaatagtaacgtcagatttccccttcggccggccggtcaagcggcagcttcagccaccaccatttgaatatgatattgactataacgcaggccgccataacgagaagataaagaccgataaacttccagtggtttccgttcagcagcatcattggtcccatcgaccatgcaaacatttcaatcggcgtcgtaaacggcgcggcaaaggccgtgtcatttaatgtcttggacaggttttccggatccacaatgcgcagcaggataaatccgatagcaaaaacgccggtggaatagccgaaaacaaaaatcgaacgttcaaaccagcttcccttgttcatggccggtccaaagaacatcagtgttataacaacgataacaattccgcagagcaaaagcatcgcaagaggaaccgcatatttaacaatcaccgaaatcttgatggaggcaattccgaaaaacaccagataatccgtggctgtaccggaaatacggctgattacattttcgtccacgtatttgctgactcccacctttttaaatacaagaaacatgacaatggcgattagaaaagctaccagatatgtaggcagatccagtccggtcacgttaaatatccacttatttaaaagcattcccgccccggaggcaaccagaaggattgccagatgccaggccagcggatccagtaccatcgaggataccggcttctgccccatggatttacgtttttcatccgggatcagccctgtctttaagtcgccggaaatatactgaaaactcttgacatattttgtccagccccgctttgttcccagttttatgaagaacaggcctccgaatatgcccgccaggatgccgacagtggcacaggtcatggcaatatccattgcatccgtatcgcccagtctctggaacgtggagccgaccgctgccgccgttccatgtcctccggaaaatccggatgccaggagaagcccgaatccataattaatgtccggaaacaatttagatattacaaggattgaaaacagcggagcaagactaaactggattgcctgtgccagcactttgtaggagaaatatgagccgatacggtccacctctgccttaaaatcattctttgaaaaggaaaatccgttgattcccactgccgcaaaaatcacaataatcaacactcctgcataagagccgatggcctctgaaaacggcaggatgttaagcccctggcttcccagggccagcgcaatgaagccggctatcatactggcaggaacgaaaaatttctgaaccactttcacttttgcccggatgagctgtccaatcataataaacagtgaagctattgcaaaatcaagtaaaaaatcatttacactcatataaccctcctgcatttacaccttacaggccggaatcaccccttcgcttccggccctcctccttttgtcctacgtcaagtctccccaaagattcagtcgctttccaatgccctgttccagggcattccggtaaatggtatatccccaggccaaatcctcgatcggcattccatccataatgaaaatcaccttttccttgtcgtcgtgtcttccctcggctttgcctgccgccacatctcccaggccggtaatatcctctttcctgattttcccatcccagaccagatccatcatgaatccgcagatgccgctcagattctttccaaagccgccttttgcatttcttaattcctccgcatatgcctcgtacatctcccagttgtcaactacaatccgtgaatccatcatcaaggtttcactgatgtccgcgctggccggaagggtaaggagagccccctccttcagccattcatcctctatccgcggggagacactgcccgatgtggctacattaactacgtcgctccctctgaccgcttcttccacagaggcggccactttaacactcaccttgtatttttcccttaattcctccgcataccgctttgcggctgcctcatcgatgtcgcagagacggatctcacggatcgatttcagtacatccatcagggcttccaggcacgctctgcctattactccgataccgatggcgcttaccgtctccgcctgatttctggcaaaatacttggctccgaccgcaggtattgctcccgtccgcgcagcgctcagcgcgttggctgacatgatggcgagaggcgctcccgtgtccgggtcattcagcaccgtggtcagaatagaacgcggcaggcccttttcccggttggcaagattagaaccataccatttttcaccgcatacatggaatcttccgcccaggtacccgaccagggccataaatctccgatccggccctttgaccggcatcccgggaaagggtgtctccttcgggaaatagatcttgattccgtgggaattatggttgggagcccccatcagataatctccctgacccagcaggtcaaatacttcatccattacctggatgcaggtatgtatgtcaccggctcccgctttaactgcatccgcctcagacagaaataaaaagtccagattatgattcatgtcaggcctcctctcattttataacgctttaccgtacccagcatgcaattacatttgaataaaattgccggattttgttcctgtggcaggcggtgccggatccagtctgcgatctgctatctgaagtacatcctccggccggatccacggccttccctgaatcgcgctcgtctcctcatgcgtcaggaatcctttatacgtcgtgaggcttcttctcagataaccgtctctttcgcaggctcccgccacaccgttcttcatgatgcttctgaaatgaggaagcaccgaggccgcataagctatggaagtggactgcgcaatggctcccggaatgttgctgacacaatagtggacgacaccttcttcaatatagcgcggattgtcatgagtcgtctcatggaatgtctctattgcgcccacgtcgttgctgatatcgacaataacggaccccttttccattgaacggaccatttcacggtcaatcaggaattctttggcgtctttcggccattttacacaattataaaccacgtcaatttccggaagaagctttttgatattatagcggttggaaatctgggtgttaacttcttcgttaaactgctttccgatttcccggagcgttccgatattaatatccatcacagtcacccaggcgccaagcgagtggagcacggaggctacggacttgcctacaattccgccgcccagaaccagcgctttaataccgggagcgccgccaagtccattgacaaacttgcccttgccgccgtgaatcgccagaagggaatccagtcccattaaagcgccctgcttgccggccgcctcgcagtttggcgagccataccggtgagaatcctccgctgtaaaggcaatgcatttgctgtccaaaagagcctgtacctcctcaggatgggctgccggatgaatacaggtaaacacaatctgattttcacggagcaggccgtattctgaaggttcaaattctttcacctttgcaacaaaatcgcattcgccgtaaatctcctcctttgtatcaaccagctttgcaccttctgccgcataagcctcatcgctgaagccggagccttctcccgcccccctctgaacgtaaacctcatgtccgtctgatgcaatcatgctcacctctgccggtgttgcgataacgcggtactctccaaccttgatatccttcaatactccaaacttcatgattcttcctccacttagattctatttttttctgccggcgccttgcagtattttcttatagctatataataagcaatttacgtgccaactttaccgctctgccataatcaagtaaaaagccttgaaacataaagggttccatacccatgagcaggatatgtaagcccttttgtctcattttcggtcaattaatatgcccattaatgagctttcaacgcccataaatgagctttttattttattactctgtttcttattgttttttcatctctgcaattgtataaccgatatacagaataatcattttacatttgaatttacaggaggtgtttccaatgacagataataaccgcttcacgtcttattctatcattatatatggggtaatcaattcttctctatcttctgagagaggtgccggaagcttctccggcacctctctcagtccccttttgatcaccttgatatattattatttttcgcttaatatccgaacgacttactgtcacggcggaagtcggaacctccatacagttttccgtcatcaccgtaatataccgcattggcatttccaaaatatttatctatctcttccttttcatccatctcataccccatttccaccagttcagctatcacactcttatctattctgccttcatatgcgacagcactggtagaggtattaaagattcttggagcatcaattgcctcctgtattgtcatgccgtgatcgatgacattgctgataagctgcgttaccgtcgtgataattcttgtcgctcccggcgtacccagcaccatgaacggggaaccgtcttccttaagcaccaccgtgggactcatcgaggacaatggcgtcttacccggtgcaatggcgttaggagattccggatcggccgagaaatcatccatctcattgttgaatatgaagccatactcgttcatggccacaccggacggatagttatgtgtctgtgttaccgcaaccatattgccgtccttatcggctacggaaaaatgtgttgtatctttatgctcatacgtccatggattaacttcctcatagacagtcgctttatcaggctgtatctgttccgcctgctttttggcatattccttgctcgttagtccaccgattggaacatcaacgtactcagggtcccccatatataaagctcggtcattaaacgcaatcttgaatgcctctgctaaataatgcagattttcggctgaattatgttccattgatgccacgtcaaaattctcaagtacatttaaagcctccaccacatgcgtgcctcccgatgagggcagcggagatgaaataatctgatatccgcggtatgttcctctgactggctccatttccttgactgtatagttttcaaagtcttctaccgtaaagactccgccgtacttattgatccggttaaccatggcctcggccatgggacctttatagaatgcatccttgccttcctctgcaattttccgcagtgtctttgccagtgccggagttttgaacaattcaccgacttcatatgtcatgccgtcatctttcaggtaaatatcaccaaattcaggataatccagcatccatccgtaatagtccttccatacctcccccagatttggagccacgtagaacccttcttctgccagtttaatagccggctgaagcacttcctcccatgtaacattgccggaaccatatttttcgaaagcgtagcttaacccggccacctcgcccggcacaccaaccgatttgcctcctattgccttctggttgccaattacattccccttactgtctttcggccacatatccggcgttgccgcctgcggcgccctttcacggaagtccagaaagaccacctcaccgtcttcgctgtgaatcgtcatgaaaccgccggctccaagccccgaatagttacattctacaacgccaagggcaaaaccgaccgctacagccgcatccactgcattacccccggctttcagaatctcaacccctgcctgagatgcctctacttttgcagaggctatcattgcgttttctcccaccgctcctctgccttccatatttacatttccgctgtcatcccacaaataccatccgtttccgtctgttaccctacccgtacttccatcctgtgtttcttcctgcgccatactctccgattccgttgttcctgtactctcttcagatgttacaggcgccgccgcttcttcagatgtcttctgcggcgctgaacacccggctgccgatgataccgccatcagggctgcaagagataatactgccagtttctttctcttcatacttttcctcctaatcttttgtgattctcattacgacgggtgatatataaccctataataacttttcaatcgttttcgtgtctactttttctcatttttctctcagtcttttttgtaatttttagtaatttatctattatcaatcaataaatacataatattttttcactttatatccataaatctcggatcggctcaactttttattgacggggatgaacaaaaagagatatgatcagactgttatacattgcaaaagcctctgctcacagagcataagacctgcagtttgaaaggagatggaatgagtatagaaatagtacccgcatacaatttccaggaggaaatccgagagttattgacagaatacactgagatgttaatcgagggagattcagatattaaaaattatctggagctacagaactacgatgaggaattagaagatttacaaacaaaatacggcctgccttatggacggctttacctggcttattccgataaaaagcctgccgggtgtattgggttaaagagaattgataataaaaactgtgaggtaaagcgcctctatgtccgtcctgcctttcgcggcagacatatcggacgcctgctcatggagcagattatacgcgaagctaaggaaatcggctattcccatatgctgctggatacgctgccgtttttgcaaagtgcaatacacatgtataaaaagcagggtttttatgaaatttccggctacaataacagccccatggatacatcaatctacatgaaattagatttataacttcctgctgcctggttatacggagaaagagcattctttcggcccgggattcccgtttcgaagaatgctctttcatctgtctgttatgcaggcaaaccgtaaatcgcgactggtttttcccggggctgctatcagttcaggtactcacccagcttatggccgcctgttgtcagctcttcataggtaggaatgcctgtcatgataagctcccctttttcagctccgtatacttcattaaaagctttcatatactctatgcatccctgtaaatgtcttccgacacgcagttccagaggaactccgttttcatcgtaggggatatacagatagccaagctcagatgccttcatataacagttatctttaccggttaaaatcagagcttcgtcaatctttccgtggagacgtccctgagccgggtttcccgtctccatcagaagagccagcgtattggtgtgatcccccagctcacggtgtgttaagccgtgcagggaaacgggtgacggctccagcgacatattgattcctgccatctgcagctccaggattcccatggaagccatattcattgccctctcatgggcaacggttgcattgatggtcggatactcaggagatgcctcatggagatccatctccatatcaatatccagcgtattgatcatattcgtaatcgcataggcaatctgttccgtcagcgtgccgtcctttacgcccggataagcgcggttgatattacgcatctcgcttccggaaagcgtctgtcccgacgtgtgggtatatacgtccggatccggccactggtcaatcggattggaggcacgcgatccgtatacaaactggcgcgtaccgctctctgtctcaaaatgatagaaatggggagagccctcctgcggatcattatgtgtgaatgcactgttgtcggttctgggaattacataaaccgtaccggcttccaccttaccgctttcaatcatcgtgattgccgccatatgtcccgaaggctcattgggatgagtcccgccaagtaccaggaaagaacctccctctttttcaccctgcatcacatagacagttgtatcgccgaatgtaccttttaaattctcattatattcgcttaactggaaagttgacgtcaccccttcaccggggataattacttcctgataatgtctgaaatcgtagaaatcttttccggcgactacggcaacggcgatacttgctacggcgcagactgctgtaacgagatttttatgtgtcttaaaaaattccattttcagtcctccttatttaatcatcaggacgcgcagtaaaagaggtaccattaccatacaagcgttcaccttcattgacggagcatcttctttgtacatgtcaattgctgtaaatacaaggaacaaaagcgcaatggctctgtaaatcaatgtaatcatatttgtatcccccttttaaaaccatcctgcaattgtctttgagaaatagatgaataccattccgtatacaagcattactgccatcggaaccatacatctcttcagaacctttacatagttgtcaacaccggtaatcttagccgcaaagaggccggccagagcagtcggcggcatcatgtcgccaagtgctgcgatgaaggacagcgccgcaatcgtaaatacggtatccatattcaggaatgccagtgcaaacggcacgccgagtacagaggaagcgccaaaggaagatacggcgccgaacagcgggatggatacgccggctgccagcagacgcaggctttccggaagtcccagacacgtcataacgataaatccgcgtacgccggtcagagtcataacctggataaacatgccaacgcccatcaggatacccataaccggaagagagctgtgaagagcctcctgaatcgtctccaccgggttcaccttgcggcctgtaaacaggcctacaattgcactgagcaggaacatcagaggcattccgatatcaggaattatcttgaatatctttgtaagcatcatcagaatcacgagtacgaacagcggtatgtaaatccggaacccgtacttttcagccacttccttgttcagatgcggttccattttttcataatccatattcctcgcctgtttcagtcccaggaacaaaaccgagaaaatagccacagggatggtcagaatcagaagaggagcgccaaatccgacgaaaggaacgtcaatacctccgccgataatcatggccggaaggttaaccggaggcgcaatcatacccagaaggccgcccatggcaatcaaagctgcggccgtcaccgtatcgagtcccataatcagaagtaccggagccataatgctgcccgcagacagtaccgctgctgtggaagaacctgtaatcatacccgggaacatgataaccgccatgatgagaatcagcagaattgccggatgtttatggaactttttaatgataacggcgctcaatgcgtccagagtacctgatttttctaccaccttcataaataccatggcggttgcaataacaagaatcgtatcaatgtaagagaacgtaccttctaccagatggcggatcggaagtccttcccccctgccaggcagccgccgattgcagaaagcatcatggacacgcctaccggaagctttgccaaaaaacagccgagcatgaagataccaatcattacgatgaatataataagttcgtgagtcactttttactcctttctgtccccttatgtaaatggggccgctgaatttttgcggccccgtttgacagactttacattatttaccgaaaatagtcttcagaggctctactgctccaacctgattgtcaataaatgcagttgcaacgccgttttctgttacgatacccttcataaaaccgtcgctgtcaccttccgagacaatgattgccgcatcggctgccgctaaagcatccgggatgaatttgtcagataaggtaccgcgtcttgcgctgccgccgatatgaagcgctatgatcgtcattccctgctcctcagcttttgcaatgacactttttacacggtctaattcctgattctcatcaactccggcggcgccgagacccttggagcttccgccgatagccagaaccagagtcttgtagctgcccaaatcgtctgccgtaacagtagcatttaagtcgctgtcgatttcacactttttaagaagtgtctgaactacgttgacatcggcgctctgtcccacgcttgtaagaataatcggtccttccgcaatggcttccgtaatttccttaacgtctccggatgccgcttcaccgccggctgcaggtgtctcagtttttgccgcctcctgtgtcgctgcaggtgtagatgttgtatcgccgccgcaggccgtcagggaagctgctgccatggaaaggcatattaatgctgctgctaatttctttttcattgtcctgtctcctttttcattgactagatattttgatttgtttcgaatgtttaatattttaaaataattatgtactcatcttgccgattaatagccgagagccttaccgtcacgtctggggtctgctccgcccagcagtgttccgtcttcaccgtacattacggcgtttacagaaccaaaggaacggttaaactcatcattcggctctaccgtatttccgagttcttccagtttcttaatcgagtcggcattaagacgtgtctcatactgaatcgcacttgtcgcattgttatacagacgcggtgcgtcaattgcctcctgcatggacatgtcaaagtcaattacgttgctgataatctgtgtaacggttgtgataatctttgttgctccaggagaacctaataccataaatggagaaccgtcctctttcagaactacagtcgggctcatagagcttaacggaaccttatttcctgcaattgcattcggggattccgggtttgccgagaagtcatccatctcgttgtttaatacaaagccgtatccgtccggaataatcttggcgccaaacaggccgttaactgtctgtgttacggaaaccatgttgccttccgcatcggctacggagaagtgtgtggtatcttcatgctcatactgccatgggctgatctgctcatatttgcttgctacagccgggtcaatctgtgctgccagctcttttgcacgttttttagaaagaatcccgtttacaggaacttccacatagtcaggatctcccatgaactcttcacggtcatggaaacacatcttaaacgcctcggtcataatgtgaagcttctccgcagagtcaaatcccatggaggcgatatcaaaattttccatgatattcagcgcttcaattacgtgcgtgccgccggaggacggaagcggggaagaaataatcttgtatccgcggtatgtaccggttacaggttccattaccttcacttcataatttgccaggtcatccatagtgaataaaccgccgtatttgttaaccgtatcaaccatcttctgggcgattgcacctgtatagaatgcatctgctccgccgtcagaaatagctttcagcgttttggcaagatccgggttcttaaatgtatctcccacctgataatttaatccatccgcattcaggtatacatttccgaactccggataattaaccattgcatcataggaaccgaacatgtcgttataaagagtgggggtaacgatatatccttcctcagccagcttaacggacggagcaattacctcttcccaggtcacattcccggaaccgtatttttcaaaagcgtattccattccctttacgttgcctggaataccgactgattttccgccgatggccttctggttgccgataacgtttccctcagcatcaagctgccacatatcaggcgttgccgccgcaggcgctttctcacggaagtttacaaatacgtcttctccgtctgcgctgtggattgtcatgaatccgcctccgccgataccggaagagttcggttccgttacaccgagtgcaaacgataccgctactgctgcgtcaaccgcatttcctccagcctgaagaacttcaaggccggccttggacgcctcatattttccggatgaaactactgctgtttttccctccgcgcctctgccttccagcgtcagattgccgttctcatcccagagataccatccctctccgtcagtcacgcggttcccggtctcagctgcctcttctccagctccggcgctctctgcttccgtgccggccggctgtgtctctgccgcgctttcagcctgtgttgaggccgtctggccgccggaacatcctgtcatggccgtcataagggccgccattgaaagggcaataagtttcttagactttctcatataagttcctccttttcctcttcccattaaaaagttgctaaagttatgataataaaccaaaacctttttgtctattttttcccatttttctcgcggagaactttatttatggagatttagttaagcaggtgaggacgccgccggtacggccagcggacggggtggtagggtgtgtatatgagtctttcgtcccgggtgtgtttgtcgtggtttggggctgcgggcgaagataaagtctgcggagcacgctcccgctctgtgaaatgcatcgcgctgctaagctcgacaggacctcgctaatcagcgatggatttaggcggcatccgcagactttatcttcccctccgccccaagggcaggttttcgccgggacgaaagactccgccaagtgtatcggccccgtccactggcctgcggccgctgatagtctcacgcgttaagtgcgggggcggaccttgtcgcggccacttagtgataccgtgtgcgggaaatatgatatgcctacaatgtgcctttatgaaaaaattgcgctagatttgatatctgcctgcggaaacacgtagtggccgcgacaaggccctccccatttaaggttggagacaatcagcgcccggaacggaccatgtccggtgccgcaaaaatcttcgcctgagtcttccgtccccggcgataacctgaactggggaagtaggcggaatcaattgcggaggggacatgggagtccgccggtgcttagcgaggtccctcacgagcttagcactgctgcgcactccaaagagtgcaaacggtccccgcagcaattcattccggccggattccccctccacgaccaacctcccacggggacagaagactcagccatccccctcaccacaccggacatggtccgttccggacgcgtcctcccaacctccgttaaatccccattattttttctcatatttctctctgaaaaacgccctgatttttttgatttttgcctcttatgctgttatgattgagttaacacaaaatacgaaccgccttctttggaggaaaaagctatgtatgttttcattatttttttcactcttatattgctgtattttctcattgaaaaccgtgtaaaccgagcctgtctcgcttcttttaaaacagtgattcatgtcaacggcattcgtggaaagacctccacctgccgctgcatcgatgccgcactccggaccagatataaggttttcacaaaaacaacgggaaccgatgccatgatgattcatacggatggaactgaaactcccgtccggcggctcggccctgccaacattcatgaacagcttcgcataatcagaaaggcgcgccgcgaaggcgctgaaatccttatcctcgaatgtatggccgttaatccggagctgcaaaaaattgcccaggagcagatagtgagaagcagcattaccgtcattaccaacgtgcggtatgatcatgtttttgaaatgggcgataccctggaagagattgcccaatccctctcctcaacgattccgcagggcggaacgctgtacacggcagacagccgcgccgccgccctgttccgtgaaaaatgcggggaaaaagactgccgtcttgtcctttgtcccgccgaatcggtggcacaggagaatatctccatagccagggaggttgccgcgtccctgggagtcacaggcgaagaatttaaccggagcctttccgccgtcagggaggactttggaacgcgcagaatctaccggatgaagaacaggaacggggaagttttccactttcttaaccttttttcagccaacgatccacaatccacaaagaataacgtggacgacgccggggatggctacagcaatctgtactttctctacaatcacagggaagacaggcctgaccgggcgcttttgtttgccagatatttttttccccattacaaagaacataccgtgttcctgaccggcaaaggcgcattccttcccaaacggcttttttccggcgcagggctcactgatctcagggtaactcccgattacagggactgccttgatctgccggagggttctctgctcatcgggatcggtaatataaaaggtcccggttacgaaatgataaaaactttagaagaacgaggtggctccgatgaatgatatccttctgctgggaatctttttaagcctgatattcacagaactgaccgacctttcaccgggggaatcattgttcctgcctatttcgccatgtatgcctacgactggaaacgcctgctgggaacgatcatccttgccctgctgtgcatgcttatcgtccactttatgtccaaatacatgattctgtacggtcggagacggtacgcggtgtatatcatgacaggcgtactcctgaaattcctgatcggttccatgggagccggcgtatctttctccatcggaagtctgattcccggcattctgggccgcgatatggaaaaacagggcataccgaaaacactgatagcgctgggaatcgtgactcttttaatccgtcttatttacataattgtgaggtagcgcaatgaaactgaaaaattactggcgtttcctggccgtattcctgtttctgctcgtttcccttctgattctcgaacagacgaaaacgcttgccagaaaggataactggcctgtaatgcttaatgcctcccggcgtatggaggttgcaatggcggctgtccgggaagagaaactgaaccgcggctataaaatctccccgatagatgatcctaatcaaaccggcatgataggggagccttacacagagattaccacgacactgggcaacctggaggccaaacgctccacagctaatccgaataccgctgccatggtagtcgatatgctgacacaatgcggagcagaaaagggcgataccgttgccgtaaacctgtcctcctcctttccctgcctcaatcttgccgtcctctgcgcactggatgcaatggagctgaaagggattgttatcaactctgtcggggcttccacctatggcgccaatctcccggatttcacatatctggacatggagcattttcttgtggagcgccagtatctgtcaaaccacagcacctttttttctctgggggccaggatgatatcggaaaggaaatgccggaggaaacaaaaaaagcaatcgtatccagactttccggcttcggatataaatttctgtactacgaggatctggatgaaaatatagccgtaagacagtctatctacgaagccggagccgaaccggcctgtttcatcaacgccggcggaaatctcatgggctttggaggcggaactgagatggtatccgccgctaacggaatcatcttgcctggcaaatccccggtgaagggacacggcctgattcccctgtttttgaacagaggcgttcctgtcatccaccttctcaacatgaaagggctacttccggcctacggactcccctttgacccatcccccataccggccgccggggaaggcggagtctatgacacatggcagtatcatcttcccctggccgtgggcctgcttttaaccggcctggtgcttcttatatgggccgccaaaaagtatccacatagaaaaatccctctgtagcatctgccgcagagggattttattgccggaatagcaaaaagcggcgcaagaggcgggacggagttttcggacgtggctgtcagcggcgggcgcagttcacagcccgttcatcttggccgttgactgctccggccggctttgctatttcacttaatcgcaaatataatcgtaaaggaaaaatgtcatctctcccggcaggccattgacatcaaaatgatgtttcttttcctgcctgcatttcattccctgatgctcataaaacccatagttacagcttgtatcggtaaacagatagaatttttgaattttttgagagcgcatatactctacaactttttggaataaagccttaccaattccttttccccggcatttctggctgattgcaaaaaacgccagttccccttgataatctgtggggcagcgggttaacagttccttatcaatcccgtctacacaaccaaaaatcttggaaacactgcgcccctcttttgaaatcataagtttgacaatagattttatcttttttaattgcagagaaaaggatgatttatgagtagccctgttttttcccatgataattccaactggaacattgtcaactaacgcaacctgtgtaaaagtctgattcgcaaggcaactggttaagtacacactggctaattgggcggcggtttgcggcgtgcagaagcgatcatagcaccacgtttcccggattacctgttccagtgccgggtagtcagattcctcaaatgcccgaaaaataattgatttactcatttcgttctattttccatctccattttattttttaatgtctgtttctgctataacctttgtcttggacaatccaaacagtatcctgccgagtgcgtaagtctgcacagcgataaattcatcacccgaaatactcccgccatgacacaatatttccatatccccgcttaccccttgcattaaaactccagaggattcaaatccattttttaaataaaaccgtttccgggcaatcctctgttcaaggttattggcagtttcattaattttttcaatcagcagcaggatacgcttatcatcatactgcctgcatatctcaccgagtattttgctgccggtccctttactgcgtatctggttggaaaccgctaaatattcaaccaaaaccatatcgtgataaggaatcagtacgataaatccggcaactacatcactttgcgatgctacccaaatttccgattttcctttttgtacagcacgttttaagaaaaaaaacggctttctttctgattttggaaaggcttccatataaatatttttcacatcgttccattggctctgacaaattctttttatctccatgataaatactccttttcccattcctgtcagcaaaaacaccagcaattcgcttgttatttctttctgcatgaactataataaactgtactgtaacaggatagtcaagggggttttgaaatgttttcagaacataataaattatttacaatcgggcaattttcagccatacatggagtaacgaaaaagacattgatgtggtatgacgaaatcggtttattaaagcctgctgtcattggagagaatgggtatcgctactacacctactttcaaagcccgacattggaaataattttaatgctgcgggaattaaatgtgtcaattccagaaatcctgacctttttgtccaaccgttctgcggagaatatggaacagttattgcgagaaaaaataacagagttaaataatacaatttctaatttaaaaagtattcagcaagcactggtaagccgtcatcaagatatgtcaataatcctaaaaattgatttatccagcatttgtattacagaacagaaaaagtcatatttagtcactgttccaacaaccgcagacgcaagtgccgaaacagaaatcgagagcattattaacaaaaccaagcaataccaattacaccgtctgcatgatgctgcatacggttctatgatttcagttgaaagtctgtacagtggtgattttcagaattattctgctttatattttgaacttcccaaccctgcattaaaaaaaggattgcatataaaacccgccgggaaatatctgcgagctttctgcaaaggaagttgggacaggctgccggacagatacaaagaaatccttgcttacgctcaaaagcaaggattatctttgacaggatattcttatgaaatgggtatcaatgaaacggtaattgatgattttaacgactatatcacacagattgaaatacaaatcaaatcgggatagtgggtgacccccgtaacgctttaccgctttttatagccgcccgtggaatgtgggcggcatttcaccgatttttactattgtttccacttatacagggttctgggccgccccatatccccataagaatactgctgccgtatcctgccttccttctccagatactgaaggtaacggtataatgtcttctttttaatctgagttacctcctccagcatgtcaatatccataaattccgtaattttctgcatctgttcctctatcttttgcagcgtcaccttgctgatgcccttatcatagttctcataatactggcttttctcatggtactgaagatgtactttgattctcgatatcaaatctacagccttgattggtttcagtgaatagtcatccgctccggctgccataaattttgatacaatccgatcctcctcctcaattgtgagaacaataatcggtaccttcggcagctttttgcggatctcctttaccgcagatatgccatccactcctggcatatgataatccaccaatattaaatctattttctcttttttaatcagcttatccgcctcttcataaccatttgcaagcaaaggtctccatccctgaaaattaaaaatttgctccagcgtatagaggatatccctgttatcatcgatcgccaggattgtcttcacactctccatccgtctgctcccccttccgtagacaaactatcactttagtgtaatggtttttctcgctttctacatgtactgctcctttatggttctctattacctgccttacaaacggaagccccagtccggtggactgtttatccgaatatcccaaatcccagatatgctccatatctcccgcctcaattccgcttccgttatcggtcactgtgatattaacaaacgcctccttttcctcaaccatgatatgtatttttccagtctctttactgactgcattatacgcattggttatcaggttaataatggctctggaaaggcgtattttattgccgtttataacagtccggggacatgtgatctcatagtcaagcatctccctcggaaccagtatggagacctgggccagaaccatcttcatcaagtcctccatcataatgggggagtatctgtcttcataaaggatttctgaaatcatcatattcatcgaaatcagagaggacgatatcttcttaaaatactcctgaatcagctcatccttctccatcatctccgcaaggctgaccagcccctgcgcaattgtcagggggcttttcaagtcatgaacaagactctgaacctcactggaatttctcagcttcagggcctccatctgggtctggtgcagttccttctccacctgcatcgtcttttcattggaaatcttcagcttatgctctttgtacaaaagctggacttgtatcagagaagcatataaaaaagccaaaaacatactcatggcaaataccgtgagcagatttttctcctccataatggaagccgctattttcacatcccttgaaatttcaccgcgtccaaatccataatcagagagatgagggataacatccagccactgaatgctcatcagaagtgaggccacaagcagcagtttattaagcatactgacagaaaacaggttcatatatgaaagctggagaacaaatccaatcaacaaaagagccggtattcccaggtcatagcgtatcccatatattctgtaaatcacgtcataaattaatacaatcagggacagggtaaatacaatattgaatgcaaatctcttttttccataaaggtatatatgtaccgactcattaatcaggaaagcccccagataatggggaaccgcacgaatgacgttcatcatgaccagctttaacgcggcaataatcagaaaactggctctgtcctccatcattcccgcccgaagtgtctcgtagatgcccagacggctctccataataatagccggccccgccactcccagaagagcgagaatacagccctggacaaataattttgaattgtattgaattcccactttcttttccatactcgcacccgctttgttccggtatgataccgggaggatgccctttaaatgcgttcttatgggcatctctttctgttagtatataatattggccggggtttttcaattctatatggagatttaacggaggttgggaggacgcgtccggaacggaccatgtccggtgtggtgagggggatggctgaatcttccgtccctggttgaaggttgtcgtgaggggggaatccggtcggaatgaattgctgcggggaccgtttgcactctttggagtgcgcatcagtgctaagctcgtgaggaacctcgctaagcaccggcggactcccatgtcccctccgcaattgattccgcctacttccccggtccaggttttcaccggggacggaagactcaggcggaggttttcgcacaccggacccggtccgttccggccgctgattgtctccaaccttaaatggggagggccttgtcgcggccactacgtgtttccggcaggccgatatcaaaccttgcgcaattctttcataaaggcgcaatgaaggcatatcgtatttcccgtacacggtagcgctgagtggcctcgacaaggtccgcccccgcacttaacgcgtgagacattcagcggccgcaggccagcggacggggccgatacacccggcggagtctttcgtcccggcgaaaacctggccttggggcggaggggaagataaagtctgcggatgccattgaaatccatcgctgattagcgaggtcccttacgagcttagcagcgcgatgcatttcacagagcgggagtgtgctccgcagactttatcttcgcccgcagtcccaactcacaacaatcttcccccgggacgaaagactcataaaacaatcccaccaccccgtccgctggccgtaccggcggcgtcctcacctgcttaactaaccccccatttaaaaggccctgccgcacaaacccgcagcagggcctcccactcttctaaaaatcagtctgaaatgctgccgtattatcctacttccagcttaccacatcccagatatccggtgtctccagacctaacttccagcctgcaacaccggccagatcatactttttgatcagatccatcttgagtcccagagattttgcatcctccatccaaagataattctttccggcggacgtatcgcattcaccgtaatactgccccacggtctcgtcccatgtgagctgcatgccattatcctcagtccactttttcgcgttgcccagtcccatggccttggatgaaaattttccgtctttttctgtccagaggcgggtaaagaacgggactccgttaatcagcttttcttttggcaccagttccagggtatctttaattcccttttcaacatatcccagggaagcgaccgaaccggcatctccgcccgcataatgctcgtcatagcccataataattacatagtcggctacaattccctgctctctgcggttatagaaacggttataaggggccggaacataattgtctaccgacagcacgaggcccttcttcctgcaggccacggaaagctctctgataaactgtatatagtgtaccccggcctcctccttcagactctcaaaatcgagattgattccgtcaaagccgtatgtatcggcttcatccatcaggctgtcaatcagctttttcctgacggaggttttagacagcagttcctccgactgaacattctttgtaatttcacggctgaaattatcgattaccgcccagacctgaagtcccatcgcatgagccttctccacgtagcttctgctagccagggattcataattcccttcattatcactcagtgtaaaccaggtcggggcaataacattcacaccttccgttgcggaaatcaattcctccattgcattgttagcggcatcaatcgtcacctgatgccagaccatattgattttttcgtccagtgatatactcttgtattcaggttctgtaaatgtactgaccggagtctcctcgtgaagattatcaagtttcctgttcgccatatagccgatatggccgtcctgtgtcataaccttggcccaattatccatcgtttccaggactacaacactctcatcctttaccagctccgtaataatcgggctttttactcctccctttacgcgaagcttcccattcgttttaaccgtggcaaccgcaacgggtgaccaggtattcgatacatagatccgtttatggctgccgctgtcatagacattcatcctgacatccgtgtagttcagaatcaggcccagcgccagatacgttttatctccacgctccagcagtatgttcttacctccgctaccggtcgtcccggcatcggccgtgaccacttcctccggcagggcgtacaccagtactttctccctgttatcccagtaaaaacgctcattcagattggcatttacccagtctaccggcagataagtctggccgtcttcgtaaatcccccggattttctgtttttcataattcaggaaaacagtgacttcattatcacggctgtcgtaaatccggctcaggtcggctctttcattagtaggcatatatcgtttatagccgtaaactccggctgcacatgccaccagcagcaaaaggaccagaaatacggcttttagcggcgattttcttctcttcatctcatcctccggtattttattcatgtctatatatttctatcattaatatagctagtatatcacaccttatccggggattgttgaattttttcttacggttctttataagttactgttcacacggtgctgttccgcgaggcgtgttattgttcgcagcacgccgctttctggcggggtgtggacagtaacctttataatcgggcaattcagtttcttccgtattaacctcctgttttacttgtaataaacccggtcaaagtggatttccatcagcagtccggtatcggcgccaatatagtctcccatataaaaggagccgtcttctttcagctcaaataattttgcatattcttcaggtgtgcattctttgccgtcaatcaggatcggaatccccctctccctgtatttcttaaggccttctacaaagatacgctgctgttccttttcacgcctttccttttcaattcgcctcttttctctttcgtccattgctatcccctcgaattttgagggacggtcgtcttttccagaaaccttcaggaagtatatcgtgatatatcagttcccgtcccgcttatatttcaggagtctctcaaagaaagccattgcttctcccgttatgacaaatgcatccggcagccacggtataaggctgacttgtacttttaaaaaccgttttatcatacccgcagtctccttattcccaaaagccgcaaaatattcccaaccgcagtcccttacccgtttgtcggatatatgctccgaaaaggctctcagtctccactcgctgaaggaacccagaaaaaatttcctgtcgcatcgcagaagttcttcttccactttgccattgtatgtcccaaaatccaggatcaccgtatcaaacctcaactgacattccagcaattcttttctgccggcatttttgtaataagagactccataggtaataaacgtctgatcttgtctgtttgtgacagttcttgtcgaataaatttcctgtatttccccgaaagctccgcttgtattccattccagaactgctgtttttctgcccattactcctgtcatgtagttgccgagaaggactgtaaaatgggtcactcccacgccggggctgcttccggccactccgataagctccggtttccggcgcttcacatcttcatttatctgttgccgcctccccttgacgggaagtgaaaaagtctttttatgcgctcccgtaccgttcttcctttcccaaatgccgccgtacggctctcgatgagtttctctagtttttgcccgcactccgtcttccgggacagctcttcaaaaaagttcccgaagcttctgtcttccggcgccggaaaccagggcattctgtaaaatgaaagttttgtgatatcttccggcaggactatatccatttcggaagaaacatgattaaaaatgacacgcagatttttactctgcgccagaaggcgtattgctcttatggaatcttccagttcccaccacttaccgccgcagaccagaatcagtaaatcataatccttctccgaaaccggctggagtccggttccccagtcctcgacgatagcattatataccggttgttccaatctgacgcagcagccgtatcccggtttcagctcccatgctccaatatgatatatcccatactgatccgggctctgttcaagatactctgccattgccaataccgaccgtgaatcattcttctcctgatacaggcttctgattccgtatcccgtcagataagccgccacgcctaaagacacatgggttgctcccatgccgtgactgctgctggctacagcaattctgagaagtgatatgttctcttcattgaaaacaccctgctttaattctataagctcctcaagtacctccctgacattctcataacgttcctctttgtgccggcgcagacaccgccctataatggctctcagtttctcttcccacccggaatttaccgtaccggcgctttttaaatcggccggttctcttcccggcgtctcaatggcctgcatatccggtgattttccggtaaacatatagtgaaggagggcgccgatggcatagatgtcggtccttacatccatcggctcgtctgtgtattgttccggggctgcaaaaccttgtgttccatagcgtttttccgtttttccggtatgagaaaccgatactgcctgatcaaaatcgatcaacttaagcgttccccggcaaattaaaatattatgaggctgcagatctaaatacaaaattggattgggtttaaacgaatgcagataatccatgatttgacaaagttccattccgaaagaaatgagctttgtccctgtcagactgccctgtcgattgaccagagcatataaggactcaccttcaagatattcttcgatgagatagtaaaaaattgaatcctcttccatgtcgtatatgatcgggattcccggatgtctcagatttctcagtacggccgtctccctgaggaaaccgctgccctcttttgccactctcttaattgccctgaattcatccagcccgagatgctttgcaagaaacacggtaccgcttcttccgctgccgatcacccgacatatctgatattttccaaataatatggtgctttctgcttctacacctcctttcggaaatatcacttctcagagtttcattataatatattgctttcattttttcaactgataaaataaaattgttataatcctaagaacggaaatgttactgttcacacggttatgtcccgcgaggtaatttcaggtttttaccctttttacgctctgcttccataaattttaataaatttttttcatatatgaattgccaattgcttatattatatagtatattgaatatgtaagctgaagtaattatccgctgccgcaggcagtggctggcttaacactgcgcagaaacgaaaataaacgtttcccgcttttaaactcagacctgaaaagacaaggaagtgagcctatgaaaatcgaacgtatcaatgaaaaccagatccgctgcacgctgtcgagctttgacttaagcgtacgcgacctgaatctgggagaattagcctatggcagcgaaaaagcaaaaaaacttttccgtgagatgattcagaaggcctccaacgaagtaggttttgaagcagaggatattccgttaatggtggaagcaattccgctctccaacgaaagtattatgcttatcattacaaagatagaagatccggaagaactggatacccgtttttccaaattttctccaatggcagaggatgaagattccctgtcttcactggccagtgaactgctggaaggagccgacgggcttctggagctgtttgcgaagacagccggtgatacagcctcttccccgaccgccggagccgccggactgaagaatcaggaaagcagctcctccgacagtcagccctctgtccggttttttacattcgatagcctggatcaggtgtgtgacgccgccagaatagctggacaagtgtttgacgggtccaattcactttataaaaacccgaaaaacctccgttattatctgattgtcagagaacctgagacaggcagtgattccttcaagcggatctgcaatctcctgtcggaatacggcagcgctctgaagacagacccggctgccgaagcctactatcaggaacattatgaagtcatcgtaaaagatcgcgccttacagacactttcgaaactgtaatgccatacctgcccggcccggaggaaatgataacctgcacgctccgcgaagcggtttttatttaaaaggagaattctccttttaaataaaaagacttccgcccaatcgggaactcgtcccgcggcggaagtcttttttatcgttcaatgcctgctgctatttagcggccaggtattcattaatggcattaactaccgtatcaacctgaattccatgaacaaagcatgcctcttccagagattctccctgtgcggaaggacagcccagacaatgcatgcccgcacccatcagaatcggagcgacgccctcatctaccatcagaagctggccgattaacatatctttactaacctgcatattccattaacctccttttgtaatatatccgtaacaccttgcggaatgtatcctgctaaaccgttacatatatccatactataatacttttccttagacttggcaagaattaaaattgttattcctctgagcagcgctttaattagacggatgccgtaaagttcatgccgtctgaactgttaccttttaggcgggctgtgagtaacaaaaattgcctgtactctatattttgtactttgcttcaatttttaaacataaaatacagtaatttcttcttgaataatttgcagtaatagtataaaataaacgcaaacgtcaaaatctaaaggaggtacttaatcatggcatatgtaattactgactcatgtgtaagctgcggcgcttgcgctggagactgtccagtaggcgctatttctcagggagatggcaaatacgaaattgatgcaaatacttgcatcgactgcggttcctgtgctggctcatgtccaacaggcgctatcgaacaggaataattaagcggaacgcttaagatacataagaggctgtcagagatgacagtctttttatgtttataaaaaagatgaggtattatatgaataaaccggttatcggcctgacggcctcccatgatttattaacagatgatttaaaaatgggacatttctatatcgatgctataagaaaaaatggagctataccgctggttctccctctcacactggatgaagaagaggccggtcagctggccgatacgctggatggtttcctgttcagcggaggccctgatgtacatccgtttctatttggtgaagagacactggccggctgcggagatttttcaccgctgcgcgactcctctgagctgctgctgctttcccaggtttacgaaaggaaaaagccggttcttggcatctgccggggagcccagctcattaatatcgcccttggcggagatatctaccaggacattttttcacagctttcaggacgcgttccgattgcccaccggcagccgtttaacgcaacgcatccggcccacagggtagcggtcgaagccgggtcccggctggcgcagatatcggaatccctctcgctggaggtcaacagccttcatcatcaggccatccgcaatgtcgccccctgcctgacggtctgcggccgtgcttcggacggcatcatcgaagcggtggaacagcccggacatccgtttctgatcggggtccagtggcatcccgagcagctggccggaaagtattcacatgccgaccgtcttttctccgcttttataaaggcctgccggaaagcctgacagcaaaactccgcttcagaggttacagcggagttttacagtacgctccaacgataacccgtacgccgcacgcacaggtcaccgccttcaataatcggccgcagcagaaacaagtcaaagcttgtttccgtttcggccgaattttttctttttaaagcggaaaaacggaaagccggtgactgaggccgccgcctccgccctgccctggttgtccctctgataagcacggatcacttcgtccagctgcttaaaccgctcctcttccctctcatcagaaacccgcatcagatattccatctctttcatcagcttatcatgcactagataactgatatcctggctcagtttttcgctgttctcttccatagcccgtccaattatatggttcattaccttctggaactgctccatcttctctccggccagcaatgcctccacactgtccttatcgagagccgtaagtccggcctctccgccgccctcacctgcttgtccatcctttactttttcatctgcccgtttttcgccgttcttgttttcattccctttctgctctttcatgtcctgctctcctatacctgtttctttcaatgcggcaattacatcctcttccaggacctcactgggaataatcaccttaccgtcctgaagggattttgccagcgcagttttaatcgctttcaactgatatcccttttccttcagcacttttacctgtttaaaaagacggatatgaaaatccgtataatatcggtgtcccatatcattcctgggaattggaagttccagttcttcctcccagtaacgcagcacatgtgcttctacatccacttttttcgacgcatctgaaatcagataatgtatctcagccataataaatcctctcctttagtccacaatatttcgtagcttactattactatatgccgggttcagaaggaatatgaatatcagggaaaaattttaacatatgttttttcttatttgaacaggcaatttctgtctattgatagaaaacaattgtttatgtttgacaattaccccagacaaatggtagaatttcagtataagcagattccatatacatctgtgttaaagaatctcttacaggaaaaattttagaaaggtggctttatgatggattattacaatcttgcaattaaacgtgaatctacaaggagttttaagaaaaaaccggttttagaacgccagctcgaagaacttcaggactattttctgcagtgcaggaaactgatagaggatattccggttacaattgaacttttgggaccggagacccagtcaatcctttcaggctgtgccggataccataattttatgatcgaggcaccccattatcttctcatctcctccccgaagatggatcattatctggaaaatgcaggctatatcggtgaggatctcgtcatgaaactgacggaactggaactggagtcctgctggatcaccgtcggagacagtaccgagacgaaaaagcgccttagccttccggaaaatatggaaccatgtgcattgattgccttcggcaatgccactgtcatgctgccctcctccagactggacatcaaaagcatctctgatgtaaccataaaaaaacgtaccggcttcgttgctccaaaactgtctgtcgaccatgccgtatacacaaaaaactggggtgagagcgcggagatatcctcactccccctcaacagcagcctgtaccaggccttcattgccgcctgctgcgccccgtcctacttaaacctgcagtcctaccgctttattatggacggaaacaggatactgtttgtcactcttcccgatgaactgaccacacctgacgatacgcgcctgaatgccggaatcgcgatgctccacttcgccggtgcgatggaaaaccatcacagttccgagagcggctggatcatgggggctcctgaagatgtcttcgaactgcctgaaggcgcgcggattgacggatattataccacctgataaatccggcgttaatatcaaacgcctcgcgggatacaaccgtgtgaacaatagcccaaaacgccctgcagggaacataattctctgcagggcgtttttccgtggcatacatattacctggcaaataattgccggaattccctcacctgtgtccttccaatcggaagtaacaccttctcatgatatttcatcttaaggctgtaaccgttattaaatgccggcaccatctcaagaacataatccagattcaccagataacttttatgtattctgaaaaaccggcagtttttcagcctcgtctcataataattcagagactcattctgaagatacgactttttagccgtatgaatccggcaggagcgcttttccgtctcaatatatataatatccgatacatcgagaacctgaaagctggctccggcattgaccatgattttattaatcgccatttcccgcgcgcctgccgcctcggctctcttctcctccagcctgcccatcgtcttttttaccctgtccaaatcaaatggtttaagcagataatctgctgctcccagctcaaatgcttttaccgcatattcccggtaagccgtggcaaaaataatctgcgcctcgggaaccttgctttttatcatcgatgccagcgttgttccgtttgctcccccaagatcgatatccacaaagcagacgtcaaatacttccgtattcagaagctccatcagcctgtcgctgctgtcggcctccgtgatttccgccgacggactgcactgcctgatcagatataccagttcacttcttgcagggcgttcgtcatctactaccgcaatcctcatctgtcctctctttctggtttggaataatcattcgcacaatagttcctgaccctcccgaaataatctgaagaccggctccttttccgaatatacccgtcagcctccgctgcacattcagcatgccgattccatgcccttcattttgatgagggagctgagaactgccgttttcataaagccggtctactatttccttatccattccgggaccattgtctatcacatcaatcatcgtcgatttttcttctttttttatacggattgtcacctgccccttatccctcttcatcgcgccgtggcgcactgcattctctacaatcggctgcaggataaggttcggtacgcggcaggtcagatcatccggctccgcttcgattcgaatcttcagatgctcctcaaaccgcgcctcctccagcatcagataggcttttacatgttctaactccgtctccagtgtcacgctgctgtcaatgtcgtccagcatattgcggaagtaggagctgagcgccatcaaaagctctctcgccttctccggcttttcccggcagaaacaggagattgtatttaacgcattaaaaagaaaatgagggttaatctgcgactggagcgccttaatctccgctttcctcagatgttctttctgtttttccatgtccaccagctttaactgggttgcgaaataattagcgatacccgttccaaattcaatatccgcacggtaggaatatgcattcttcctggccagcatgacaaaagaaagaacctcctccccgctgcggacaattggggcggaaataatcacatttttctcatagagaggataaaaagcatcctccggcaatggaaccctgctgattctcgtggttctgtaagtcttcgtggctgccaacagacggggataggaggttttatccagtataatcgaatcgaaggcgctgctccgtcccagaaattcatactccctgatcaccgccacacccacgcatttatgctcagacatgacaatatcgattattttctgcatgctttccctgttcgtctcggcatcaccgagataaggagcgcaccgctccgctgttctgagcgccagggatacattaaccgctaccttcaggtcttcattattgaatatggatttaaacacgctgaaaaagatgaccataccgaccgaattaatgataaccatcggcaccagcacaatcttcacaattacaagcgcctcgttaaacggtctcgttaaaatcagtatcagtatcatatggatcgcttcggccacaaaagtgctgacaagaaggaaccagttggaatactgcctgttgtccttttttgcatatccaatccaggagccgatcaccccatggagtatagccgccaaaacgcaggccagggtactgatacgctccggaaatataaggtaccggtgtatagaggcaatgacggccgtcgtcattcccgatacgggccctcccagaaacccggctgacagcacaccgattacgcgggcattgggaagcgccccttccacctggattcctatatagtcggaaataacacagaatattccgaaaatgcctcccaatacaagctggttgcggacttttctggttccggttttgcgatcgttgcgttcctcctcttccccgttcaaaagaagcaccttgacaaattctatcttagtcagcataagggccagaacaatgagcagagagatgttcatacagatactcataataacgtcataaaccatactgattcccccattcccggcgctatccgattaacgataaccggcacgctgcgcgcacaggtcaccgccttcaatgataaaaaggatgctgcggcttccgtgcagccccgcagcatccctttatgccggtttttttacgtaactattgtaccatgtttttttgccattgtcttctgtaataaaacaattccaacgcagattgcaataccgataatatcggtaatcaggccgctgtcaattaacagataggcgccggcaaaacagagaatacgcaagacggcattgacctttcgaaacaggaatccctctactgccacactgatcaggaatacgccgatggcagcggtaatcgccacctgaattcctttggcaatcggagtatcgagaagcagaagctccgtattataaacaaacatataaggcagaataaagccggccagggccagtttgaccgacgcccatccggtcttcatcgggcttcctcccgctattcctgccgcggcaaaggctgccagggcaaccggaggcgtcaggtttgcaaacattgcaaaatagaagcagaacatatgggccgcgatcgggggatccccagtgtcacaagtgccggagccgcaatcgtggatgtgatgatataggacgggatactcggaagtcccataccgagaatcatacacgttaccattgtaaacatcaatgtgaacatcaggctctgtccgccgatttgaataatcgtacttgccatgttgagtgcaaaaccggtgatactgcaaactcctacgataattccgacgcaggcgcaggcaatggcaaccgagacagtcgatttggcgctggctaccatggcatcaataatatcgttcaggctcatcctggtattcggacggagctgtgcaacgacgattgtaaacagaattgtgtaaaatgcggccataataaccgttttcccgctgaagaacagcatatagatcaggaagacgagcggtatggcaagatggccgtactccttcattacttccccgactttcgggagctggtctttcggcgtaccctgcattcccattttctccgcacgcatctgaatctgaagcaggattcccatatagtagattacggcaggaataatggccgataccagcagcgtactgtactttatgcccagagtctctgccatgatgaaggcggccgcgcccataaccggcggcatgagctgtccgccgacagagccggtggccacaatggctcctgaaaattcgttgtcgtagcccgtctttttcatcagcggaatggtaaaggaacccgttgtcacgacgaccgcaacggcagcgccgttaatcattccaagtagtccggaggccacaacggccacctttgcaggcccgcctttgcttcctcctgccagcgcgttggcaatatcattaaagaatttacccatgccgcacttgttcataatctcgccgaatgcgataaacaggaatatgtacgttgacgcaacattgacagatgagccgtatattccctctgtattggcaaagaagtggctcatcagcttctgccacgtatatcccctgtggaggaatatgccgggaatattaaccggtatcaggccctgctttgttcccatcaggctgtataaaataaaaattacgcctaaaataggaagcgccatgccgcacacccgcctcgttgcttccagcaccagcagcgtaagcagcgttccgattataacatccatggagttgggctttccggcccgattgatgatgttgaaataatcaagccacatgtacagcggtacagcggccgagagtgctatcaggatataatcataccaggcaattattttccggcttgccttttttgttgcgggatacatggcaaaagccagtatcagaatcatagacacatgaagtgaccggtgcttcagtgtctcaggcatccagaaaccggatgcaaacacaagatgatacagcgtaaccagaattgcgaatatcttatatgccatggcaaccgccggtgatacaaaggtacgcgtcttactttctttatcaaatttctcaaggagttcctgcttgtcggcctccgttatctctttatccctgtcttccccggctgctgcctcagcattctcctccggtacggctgtatccgccgttttcttcttccagaccatttcatatcctccttgccctattcaatacaaagtacgattttctgatgatggggcatatcactgccccggatcaaaaggcggccgtttaatcctatctcttttaatgccgtctgcgaattaatccagttaaactgaggaaattcgctctctatatcgtccatgtaaatgagtccatcctcatagcggtaggtacagtccatttccgcaggaatacccgcgccgaacccggctaccgaaatcgtatgcagaagaaagcttccgtcttcttcaatctcataatattcattccacgggatatgctcaaaagagtgctcccacccaaaggtcagttcatctccggtctccaccggcactctcacataagtgtctcccgactcctggttcctgatgaccagatattctctctgccgcagccggaacgctgcggcagaaaaaataaacaaagctgaaagaatcagcagaatagctgcggataataatagcttagttctgcggcgtatcatatccatgatcctgccaccattttgcggcgccgtcgtggagtgggatcttaacgtcatctacaccgaaggtcacgtcgatattctgatcggctgtgttatgggaggctttaatgctgccgatatcattgaagatacagtccatcatgtcatataccatatcattggaaaggtctttgttgaccagcataatgttatatacaaaaacgctctccacatcctcctcattattataagtatcggcggggattatgctggccgcaaagaacgggtatttattaatcaggttatctcttccgtctccgtcaatcggtacgattaccatatcatagctgaacgccagctcactgaccgtagagtttggaagtcccgatgtaacaaaagcggcgtcgcactgtccgtttttcatctggtcgatggcctcaccgtaagataaatagtcaacctcgctgtcttcataggtcattccgtatgcctcataaatcatgcgggcatttaattccactcctgagttgggagcgccgactccgacacgtttccctttcagatcctctacgctcttgattcctgtgtttgccgtcgttacaagctgaacgtaattcggccacaggcgcatagccgcgcgcagttccgtatttggcgtttcaaaagcgccgaatccctcatacgcctgcatgacggaatcctgcattgcaattgcaagctccgcctcacctgcggtaatcaggttaatattctcaaccgaagctcccgtcgcctgcgcggaggtcttgtaccccgcattgccgagcaccgtcgcgaaagctccgccaatcggataataaattccgctggtaggaccggttgcaatggttacaaattccgtggctctgtctatatccacagaaggcgcctgaacaccctccccttcgtctccctgggactccgccgccggtgccggtgctgccgtgctgcctgaaccggaagtccccgaatctcccgagcaggccgtcagtgacgccgccattgtcaaacaggtaatgcatgccacgattgctttcattgtttttttcatattccttaccctctttcttatttgttcactttctttttatagttatttaataattatgagctaattttacattttcttaacaccatggtcaatggaccttgtgcaaactgcccaaaacagcgtttaaaacgtcgaaatccgtgtatgaaaagcagcttaaaaaagccgattataatttcctttttgaatgctttcatctctcacagcatttgacttttaagccggcagagactaaaattcaattaaacgcagcttttaaatcatatcaacattttcggagggaaaaatatggactacagacgattcggtaataaaataatagcgaggattgataaaggcgaagagatactggaaaagattaaagaaatatcattaaaagaggatatcagattagccgaggttaccgctctcggcgctatcaatgatttcacggccggggtgtttaaaacgctggaaaagaagtatgattcgaatgatttcaaaggaaattttgagattgtatctttgaccggaaccataaatacgatggacggctgtttttacacccatatccatatgagcgccggcaatgaaaaaggagaagtgttcggcggtcatctgaacagggctgtcgtgagtgcaacctgtgagatggtcataactataatagacggcagcgtcgatcgccgttttgatgaagaagtaggtttgaatttattgaacttcggggaggtttaagatcatgaagaaaaaatttgcttttattcttatgagtgacgcttataatcctgatgtacatcaggcatcttttgagaaagagacaatgtccacccatatctacacagtccgcagcttcgaagaggcttgctcgaagcttaaggaactggagaaagaggggttcggggcagtcgagctgtgcggggccttcggcccggaaaaagcgcagcagcttattgaacttacccataataaaattgcaatcggttacgtagtacacaatccggagcaggatcagctgtttgatgcctttttcggacactgagcatgattctttttctatttagtaatttttttcttccgcaacatgcctgttcagtttcttaacttccggtacaatgaagcaggcaactaccagggcagagccgacatcggcggccggtcctgcataaagtatcccatccaggccgaaaaagagaggcagtatcagtatcagcgggacaagcagaagaagctggcgcagcatggataaaaccgttgctttcagcggctgtcccgtggcctggaaataatttgtcgctacaatctgaaatcctgcgcagaaaatacctccgagatatacccgcatgcatttcactgcaaactccatgaaaatctcattacctccgccaaacaactgtataatctgtcttggaaacagttggcataccagccagcctattactacggaaactgtggctgccgtcatcgcgcattttaacaatttctttattctgtgataatgtccggctccgtaattatatccccagatagcctgagaaccgattccgataccaatacagatggaggcgagtatcattgccagcttcattataattcccatcgcgcttagcgcaacatcccctccggtagatacctgattaccgtaaagaacaagtgaattattcatgacaatctgcatcaggcaggccactaattgtgtcacacctgaagacattcccagagtaacgattcgtcctgccacacgcggaacgattttcatcttactgagcttcaggcgtattgaaccttttctgataaaataccatgccagaaccgcggctgagataagctgtgatgtaacggtggcaatcgccgctccctttacgccccagtggaagataaatatgtagaccggatcgagtattgtgttaagaactgcgccaatcagtactccgtacatggacagcctcggctgcccgtccgtccttgccatgtttgaaagacacggtcccaatatgctggccggaactcccgccagaataatggaggcgtaatccctggcgtagggcataatcgtatccgtcgcgccaaaaagccgcagcagcggatctaaaaatatcagccccgctgccgaaatcaaaatgccggataaaagcccaatgataaacatattattcaggacatcttcagcctcctcctcctgccgctgccccagtttaattgccgcataagcgcttccgcccgacccgattaaggtggcaaaggccataacgattgtcatgaccgggaaggatacggtggtagccgcatttcccagataaccgactccctggccgataaaaatctgatctacaatgttataaaccgcatttaccagaaccgctatggtcgccggtaccgcaaattccaccagaagcagaccgatgggcttatactccagcgggttttcttttcttactgcaaattgttccaatattaatacaccttcttattttttattgattgataagcattttcagccattttcccaagcagttttgccgcctgttccttctcctgctccgttaaaccatccattaatatctcattccagtgtctcccgacctcgtaaacttcctccacttgcggcagggctttcggagtggtatataaatgacagagcctcctgtctttcgcatccgtttcttttattatgtactccttatcgatcagctgctggactgcccgggtcaccgtccccttgtcgaagtatcccagtcccgccaattcctgcatgctgattccctgattctcatagattcgaaccagaaaaaactgttgtccgctctttactccttcgaataactccctgtcaaaaaacctttgtccatgccgatgtataatggatatcagcttattcagttgatatggctgcctcatcatctgtttcctccgtcacaatagttgcacactcaactattagtttaacaccaaatggttgagtgtgcaactattttttttgtacttcaattataaaagcattatgcaaaatgtaacagttcagacaggacgctgttacttaaatttaactgaggttgggaggacgcgtccggaacggaccatgtccggtgtggtgggggggctggctgattcttccgtccccggttgaagggtgtcgtgagggggaatccggccggaaagaattgctgcggggaccgtttgcactctttggagcgcgcagcagtgctaagctcgtgagggacctcgctaagcaccggcggactcccatgtcccctccgcaattgattccgcctacttccccgggtcaggttttcgccggggacgaaagactcatatacacactccaccaccccgtccgatggcctgcggcggcgtcctcacctgtacaaaataaaaacaaagcagattaaacagtcttcctgttctctctgctctgtctttattttgccaggtttgcaaattttgtcagctccggcctccacataagctggatggttcctatcggaccgtttctctgttttgcaataattacctctgcaatattcggcatatccgtatctttattataataatcatctcgatataaaaacattacaacgtcggcatcctgctcgatcgcccctgactctcgaagatcggaaagcatcggcctgtgatccggcctggtctcacaggctcgcgacagctgggacagcgcaattaccggcgcattcagttccctggccagtgccttcagtgatcgcgatatctccgagatctcctgctgcctgttctcaccgcccttgccgctgccggacatcagctgcaggtaatcgataattacaacgctaagaccatattccagcttcatcttacggcacttggagcgcagatccatgatggagatacccggtgtatcatcgataatcagctttgaatttccgattactccgatgccttccaccaccgcgtcccaatcggcatctgtcagggtaccggtacgcagcttttgtgaatccacattagactccattgaaagcattcggtttacgagctgctcttttgacatctccaggctgaaaaccatacagggaagtcccttcttaaccgctacatggtcaacaacgttgagtacaaatgctgttttacccatagacggccgggccgcaatcaaaataaaatccgacggctgaaaaccggatgtacggtaatccaaatcgatgaacccggtgggtacgccggtgacggttccctgattcttagatgccgtctcaatcttttccaatacattcaaagcgacctgcctgataggcacaaattcacccgagcctttactctgaagcagatcgaacacggctttctccgtatgagacaaaatatattccagtttatccttgcctgcgtagcaaagcccttctatctcttcgtttactttaataagccgcctcagtacggctttctccctgacaatattcgcataggttttaacattggcagacgtcggtaccgttgtgactatgtcgcggacaaactccaggctgctgacctccggcgggacgtccttttcctttaagcggttctggagtgttaccagatctaccggcttgccctcattgaacagctccaccatggactcaaacatcacaccatactggtgctggtaaaaatcggcgcctgtgactatctcagacgccgaaataattgcctctctatccatcagcatcgagccgatgaccgactgttctgcttctacgctgtggggaagtaccctttttataagcgcttcatccatctgtagacctccgatttctgaacaattaccggcttgtcagaatttccttttttctgccggattcttagctttccactaccttgacagccagttttcctgttacatcccgatgaagcttgatcggcacctcatgggttccgaacgtcttaagcggttccggaagcaccagtttctttttatcaatttccattccaagctgatcctggatcgcttttgtaatttccttcgatgaaacagagccaaacgcttttccgccctctcccgctttgatggaaagtgtgatggatttctccgccaggtccgcagccagatcctttgccgcctgaagctgctccgcagcgattttatcggcgttggccttctgcagttttaagtcgttaaggttctttgaagttgcttcgattcccaatttcttaggcagaataaagtttctggcgtaaccatcgttcacctttacaatctgtcccttttttcctaatgcttttacgtcttccaataatacaacttccatgtctatatatcccctttctccagcatgtctgtaataatctcttttaattttaccttggcttcctcaatcgttgctccctttaactgggctccggcaatcgtcctgtggccgccgcctcccatcttctccatcataatctggacattgatctcgtcgatggaacgggcactgaagtaaatcgtgtcatcaagatgggtaagtacaaaagatgccttgattccgacgatatcgagcatctcgttcgccgcctgggccccgaccacggtcggactctcaatcccttcagccggacactctgaaatggcaaaatactctttaaatatctccgccttctggattgcctcggctctcgccttatagtcctccagcttatcgcggaacaattttctgaccctgaccacatcagcgccgtttctgcgcaggaaagctgccgcctcaaacgttctgactccggcctggttcatgaagttatttgtatcaataacgattccggcatacatggcgtcagcctctgccggcttgattttaatgccgtctccgatatactgaagaatctcagccaccatctcacatgttgaagatgcatacggctccacataggacaacactgcgttgtcgattatctcactgctctgtctgtggtgatccagcaccacaatcgtcttaatcttcttaagcagttccggagcttcggcaatactcggcctgttgacgtcaacgacaaacagcatcgtattggcatcagcccactcagccgcctcttcacccgtcatcagcagatcttccgggtaatccggattgttctgaaatcttgccatcatcggcttaacggaagaattgacgctgttgacgacgattctggcctttttattaaacgaagtggctatccggtagatcccgatggccgcgccgaaggagtcgatatcgccaattttgtgacccataatcagcagtttgtcttttgtatccatcaattcccgcattgcatgcgctttgacgcgggctttaacacgggtcgtcttctcaagctgctgggattttccgccgtaatagcggattctcgttccgtccttgactacagcctgatcgccgccccggcccaaagccatgtcaatggcggttctggcatattcgtagttcgttatatagctggttccgttcatacccataccgatgctgagcgtaaccgccatctcgttcccgatattaacagtcttaacatcttccagaagcgaaaaacggttctcctgaatctcttccgtatactgctgcttgatgacaaaaagatatttatccttctcgagcttcttaacaatcccatccatattggagatatatttgttaatcttacggtcaatcagtgcagaaagaagggagcgtctcacctcttccacgctctccagcgcctcttcataattatcgagataaatcaggcccgctaccagcttctggttatcaatctccctcttataggagagtacttccgtctcatcaaacagatagatagccagcaaggtctcttccgtgatcccctgagcttcttccagcttcaggctctcattctcatccatataaatctgcctgatatcaacccggtaaaatttcccgtcaaaagaagaatggatgctggaacgttcctccatatcttccagaatttcttttgtaatatccggaaaaatagccgtcaggctctttctgcagcttttgtcctctttcacaacagccccgaaggcactgttcatccaaatcagatggccttccgaatcagctatcgcatatggcatcgccatctcagagagaagctgcttctgcacccatgcatattccgtcgaaaactccaccagtccgcccatcagccgttttctcctgtacaggaacagccacagggcaattacaatataaagcaaggtaaatccagacatagcaaagccggccttggagctgatcgcacccacaaccaggtttgccgccatcaaaaaaaccgacaatattaccggccattgcagataaaaacgcagttggccctttatttttgtattttctctcattctctgtctcccgtgaaaaaacgcccacctattctcaacattatatcataaacaaatctgttagtccagaaatagattggaaccgggtccggcgccggtaacagttagttactgatcactccttgcggaaaccaaaattccgccgggtattaacctgctgcttttgcaatatgacgtcaaatctgatataataggcagacaaagagaaatcgggtaaattacaaatgagggttatcgcttatgctattattcagtatggttgagaatgaaaaagatttatcgaagtttcagcggatttatgaccagtataaaaacatgatgtactgggttgcctatgatatcacgaagaacacacatgacgcggaagacgtggtacagctttctctgataaagctgattgatatattatacagaatagaagaagaggaaataggccggtcacgctgcaaaaatctcttgattactatcacaaaaacaccgctatcgatcatttacgcaaagccagtcatgcgccaatcccttttgaaacagttgaaaaaccagataccagccggagtgcggaggatctctacatcgagacggaggactataaaaagttaatccaatgcatagacaaactggacgaaaaatatacagaggtactcaggttaaggctccttcaccacctgagcgccagagaaacggctaaaatattgaatataagcgaatttaacgtgaacactcgtcttttgcgtgcaaaacggctgctggcagagctgttaagggaggtgttaaaatgagtgacgatttaaaacgaaagaaaagtgattatttattagaattagccctcgaagaacagcttgaaaatgacggagaaatgcaggcctatcaatccggcaatgaacgtccccatgaattttctgatgagcataaccgtaaaataaaagatatattaaaacgggcagaaagagaagagaacaagaagaaatatcgcagaaaacgtcttcaggctgctgcctgcatcatccttatcctgtctgtcagcactctgactgtgacgcgtgtggaagcatttcgtctgcctttgatacggtttttctcggagatacgggaaaagtcaacgaagcttaatatgcagggagaaaataattttaatttgactaaaaaatttcaggaatatgagcctcagtatattcctagtgggtttagtgttaacagctttaatgaaagtgaagtgtctttctatataaagtatgttaatgatgaagaaaataaggcctatacattctattattttcaaaattctccaacaaaggcaatggatacagaaaaagcagatgtagttgaaactgaaattaatggcaataaagcctatataattgaaaaagaggaagaggtaagaattttaatgtataaaaacatgcatcagttttaccttcgaggttcacttcctgcaaatgaagcttataaaattatggaaagcataaaataatataaaattgtgttatatttgaggttcctgaaacgtttataatatgaataaaaaaaggaggaatctttgtatgaaaaacatgattcgaaaagtatttgtaacttttgttgtcaccgtcaccatgatatcctgccttgctatgacagcttttggtgctaatgctaccccagatggtcacactggacgatgctaagcggtgagattataatcaaatcggataatgtagctcttgtttccgttgtttgtgattgcagtcccaaagaagcaaataaagtaaccgtaaaatgtgaacttcaacagctggacggttcctggaagacaataaaaagttggacagaaacagaaaatgacacctcaatcatagtagaaaagacatatggtattgcgaaaaattacagttatcgtgttaaggtaacagcaaaagcatataaagataccaaactgttggaaaccgtaaccgaaacctttgattacggctattatcagtaaattttttttgctgatatgttcctaatgatttcacacaaaaaagaaagccggtattgactttcacggtacatcgtataacgataacctgcacgcaacgcgcacaggtcaccgccatcaataaggagcccccgaacatatattgttccggggctctcattatttataagtatcatattgttcataggtcgggaacttactgaattgaaatgataatcaataaatatatttaaattcacaaagaattatttatgagatagaaaatacagattagaataatattccccattaaatggagggagccggccgggatttctccccgccggcatgagtatgaaaaagtctatgtaaaaggttgttctcctgtttgattattactatacaggaaatttgtgaccaaagtttgaccctgaaataaacaaaccataaaaaggattaagactttctgacaaaatcaggaaattcatatcaaccggcccgattcaacttgaatacgtgacaaccttaatgagcaaaaccgttgccgcgtcatatactataagtaatgggaaattgaaggtatactcctatgcatgctgaaaggtatacaatcactatatttggaattgacgcaaagtactatactgatgaatacatttcacatatctggaaaacttgtactgaaaatgaatatcaaaaaagccgtcaatttatcaccgggcttgttgataagagaagcctggtgtgcggaacaataagaggatgcgaattagccgaatacgcccatatcatcacagtcgtcagaaatcctgttgagttcagcgataccgatactttctggaactctttaaaaaatgtactcaaggaattgcgggtttctctggggaatcccagtatgacgatcgcgaagcagcagatagaatattattattttaaatagtaaaacgattataaaaacttccctgaaaaaaggggggccggctggatttctcccgccggcatgagtatgaaaaagtctatgtaaaaggttgttgtcctgtttgattattactatacaggaaatttgtgtcaaaagtttgacctgcggataaacaaataataaaaaacataaagactttattatggaattggaaataatcaaataaactctggtgttcccggcgctgttgccctcccccgttactgttcacaccccgccaggaatcggcgtggtgcgaaattccattccagtattgacaatccgtcaatatagtgttacactcaccatcaatagggagctcgtaggcgggctgagaggaagtaatctaacttcgacctttataacctgatttggataatgccaacgtagggatcatacaagacggatatataactattcgagcctgggatctgttggtcccaggtttttttatttaacaggaaagactcctgttaaataaaaaccgctccgcggaggatcgcactgcggcgggatggaattatgtcgccacagcgacccgccgcaggcggagaatcccgctccgcggaaaatgcgcactgcgtactcaggcgtatgaccgctaaagcggacgcgctccggagtgggtgccggccgggacaggctctataattatatccctgatccctccagaaaaaaaggaggatatgcaaatgagctacaccacacaaatggacgccgccagaaaaggcatcctgactaaagaaatgaaagccgtggcggaaaaagagaattttgacccgcaggaactgatgcgcctcgtcgcagaaggcaaggtggccatcccggccaacaaacgccacacctgtcttgagccgaatggaatcggttcgatgctgaaaacaaagattaatgtaaacctgggaacctcccgggactgcagtgatctcgacatggaactgaaaaaggtgaatgacgctgtcgctatgggcgccgagtcgattatggatttaagttcctttggagatacgggcaaattccgccgcaaactgacttccgagtgtccggccatcatcggcaccgtacccatctatgatgctgtcgtctattaccataagccattaaaggaaataacttcaagagaatggattgatattgtgaaaatgcatgctgaggacggcgtggattttatgaccatccatatcggcatcaataaaaatacggcagaccgcttcaaagaggcaaagaggctgacaaatatcgtttcaagaggcggttccatcatcttcgcctggatggaaatgaccggtcttgaaaacccgttctttgaacatttcgacgagatcctggagatttgccaggaatatgatataaccctcagtctgggcgacgcctgccggcccggatgtatcgcggacgcttccgatatttcccagatcgaggagctgattaccctgggtgagcttacccagaaggcatggaacaagaatgtccaggtcattatcgaaggcccgggccatatgcctcttgatcagattgccgcaaacatgaaaatccagcagacgctctgcaaaggcgcacctttctatgtcctggggcccctggtaacagacattgcccccggttatgatcacatcacggctgccatcggaggcgctatcgctgcagcgtcaggagcctccttcctctgctatgtaactccggccgagcatctgcggcttccggatctcgacgatgtaaaggaaggcattatcgcctcccgaatcgccgctcatgcggccgatattgccaaaggtatcagaggagcctccgactgggatcagaaaatgagtgaggccagaaaacggctcgactgggaaaaaatgttcgacctgtccattgacccggagaaggccagacgttaccgcgccacagggaaaccggaaaaagaagacacctgctccatgtgcggtaatttctgcgctgtaaaaaacatgaaccgtatcctcgaaggagagattgtcagcatctatgacgaataaaagaatcgcttatacttgaaggaattacatatattcatgcaaataaggagaatacgtaatgaaaaatcatatgacagtcctctgcggcgatgaaaaagattctgctcttcccacgcacactccgacgagagcctccaatgccctgagtctgagaaaaactgtaattggaggcatgctggtcgctctgaccgtagccctgtccggcttttccgtaccgatcggcgcctcccgctgctttccaatccagcatttcatcaacgttatagccggagtttttcttgggccggtatatggcgtcgccatggctttctgcacctctctgatccggaatctcatgggtacaggcagtctgctggccttccccggaagcatggcgggagcgttcctgggcgcatttctcttccggaaaaccggccgctttgttctagcttatgccggcgagataatcggaaccggaatcattggggcaatgctctgctatccggtggcagtcctcctaatgggtaaagaaatcgcactctttttctatgtcgtaccattcctgacaagtactgtatgcggaacggccatggccgtggttcttctcgagatactgcgccgctcttccctgttctcacaccttaaccggatgattcagggataatctcccaccaaaaaggacggcccgtcatttaaccgggccgtcctgccatacactgttctgttcaggactgcactgacaatgctgccgtcatttaacagcttcacataataattccacacacttatcaagacccaaatctccgctgttgagcatcagatcatagttctcacggcttccccacttctgatttgtataattctcatagtggatccgccttctcttatctgtctggtacataaattcatcaatatattcttctatctcaccgtattcttcaatggcccttctcttcctgatgtcccggtctgcataaataaatacgcgcagaacatcgggccggcttttcagaatgtaatcggcgcagcgccccacgaagatacaggaaccccgtttggccgcctcctcgatcgctttcttctgtgcctggtaaatctgctctgtcagcggaagctccgaaaccttaggctccctcggataggcaatcccataaagagtacccatagcaaaattataaagcaggctgttggtcaatctctgctctctgtcagcgatcatctccgtaggaaagccaatttcttttgccgccgcatcaatcagctctttgtcataaaattccattcccagcttctttgccacggtcagtcccacctggcggccgccgcttccgtattcacggctgattgtgattatcttttttcccataatacaggcctcctcccatattcaacaggcgcttcgctatcgttccttccgaactgtagcgttaattcaatactgcaattcttacctatataataccataacaggaggcaattttcaattaactatggcttgtatcaagaaattttctgtatctttattattgttcacacctcgcggcatacagccgtgtaaacggtaacgtatctttttacaatacgctgcgcctctactgtctgctcagcctccgtatttccttcctgagtgtcggcccgatcaatacagccagcgctattttggcggcatcccccggcagatacggaatgacaccggctcccagcccagccgtaaagctgattcccagctggccggccagccagaccgtaccaaagacgtaacatactgccgtaccggctgccatccctgccacatgggctatccggttgccctgaaagtgatcaatgaaccagcccgctatgactgccataaaaataaatccaaccagatagccgcccgttggccccgccagctttgccacaccgcctgtaaagcctgaaaatacgggaagtcctgcaaatccaaggagcagataaataagataacttatcgttccggccttcattcccagcacatacaccgtcaggtagactgccagattcgtaaaagaaatcggcaccgggctgatgggaatcgggattgcaaagggacccagaatacaggttaccgccgtcataactcctattaatgccatctgacttgtcgataaagctctctttttcactgagctgcttgctgtcttttccatggttcttgtcctctgtcctttcctaaacctcaaatcccattgatgtcaacatcgccatatcgtctgcaatgttatttcccgatgtggtcagcatgtcccccgtaatcgccgcgttggccccggccgtaaatacctttttgccggaatgttccattgaatttctccctgctgccagcctgacctctgcatccggattaatatagcggaacattgcaatggtacgaagaatctcttcctcgctcagaggcggcagcgtcccgaagggcgttcccgggattggctggagaatattgattgggattgattttatttccatctcatacaggctgaatgccatatcgactctgtcctcccatgtctcccccattccgatgattccgcctgaacagacggccagaccggcatttctggcgcgccggattacttccagcttatcatcatatgtatgtgtggtacagatatttgggaaattccttctcgatgtctctatattcgcatgatagcgggaaattccagcttctgccagcctgtagaagtcctcctgggaaagcagtccgtgggatgcgcacagttcaatcttgcaattttccttcatgcttctgtatgctctcagagccagatccatttcccggccgttcagggccctgccggccgtgactacagagtatctgccgactccctgtctctcatgccttctgcaatcctcaagaatctcctccggttccaggaaaggatactcgtttatctttgcattgtggcatgatgactgggcacagaatttgcagtcctctccgcagcggccgctgcggccgttgatgatagagcataaatcagccctgtctccacgcagcctgcgccggatttcatctgctcccctgcaaagagaatctaaatcctcttccatgaaaaaagctaaatcgtcctctctgttcagacgtcttccgtttattatctcttctgctattcttatactcattgtaattccgcctttcgatactgcttattataaacaggcggattccaattgtcaactatattttataatttggttaacattaaattttttccaatattttcgccttgattggagcatcaggcccggtaccctctcatgaaatcagagtaataaacggacggacgctccgttccagtattccggtcatatatgcaattgccaccccgtaatttgtcatcggtatattctggtcaaccgccatcctgagacggtacttcatttctctctcgttcagcatacagccgccgcagtggatgatcagatggaaccctgataaatcctccggaaattccgtgcctgatgtaaatacaaattccggttcttttcccgtaaactcccggatccaggcaggcagcttttctgtgccgatatcaccgcactggcggtgatgggtgcagccttcggaaatcaggattctgtctccgtcttccagggttttcagcgcctttactccgcggcatgtctgaccgagatcgcctttatacctggcaaacagaatggagaaggaggtcagcaaaagattttccggcacaatcttatccacatcggcaaacacctggctgtccgttatcaccagtccgggcgcccggttcagggacgccagcacattcttaagctcgtcttccctgcacataacagccgatgcgcctgtatccagaatgtcacggattacctgctgctgggaaggatcagacgccccttcggagccgctttatcaaccggaatgaccagaacaacgaggtccgacggttttatcagatcagcggccagcctccgcccgtcgccctccggcgagacaagagcggcaatccgttcctttaattcatgaatatggtagccggtggccgcgctgacccatatttcatggcggccgccttccgtcccctctgcgccgttcagatccgtcttattatatgctaccaggtatgggatatttttccttcggaaaatccggatcaaacgttcttcctgctcccctttcccggccgacgcatcgactaccagaacggcaatgtctgttttattcagtatctgacggctttttccgactctcttttcccccagctctccttcatcgtcaatacccggcgtatcaataatcatgaccggtcccagaggcaggatctccatggatttacagaccggatccgttgtcgtacccttaacctcggaaacaatcgccagctcctgacccgtcactgcattgacaagacttgattttccggcatttcttcttccaaaaaagccaatatgtattctctcccctgacggggtttcattcagtcccatttacgcgcctccttatactgcctgtgtcgtggtggttccgcttctgtcaaaatctgaaatcacgtttgccctgttctatctcttccagatttttcagtacaatttcgcgaaccttttccctgggtatgttctgaatctccttcataatcagcttcccgcctatctcgcgtgtatcaggcgccgcataatcctccaggtattctttcagtgtcatcagggcgttcggatgacagcagttctggatctgtccgctcttacagaggctcataaaacggtctcctgttcttccctcccggtaacaggccgtacagaagctggggataaacccctgatccatcagccaatgcaccacctgatccagtgttctgttatcgctgacatcaaactgggatgagttttcctcctcgggctcttcctctgcatagccgccgacactggtttttgagcctccgctaatctgggagactcccagcttcaggacgcgttcgcggcagctcttgctttcccgggtggaaataatcattcccgtgtaaggaaccgctacccggatgcaggccacgattttctcaaatatatcatcatcgatgccgttatcaaactgggacggatcaatatcatcagccttcttgattctcggcacgctgatcgtatggggccctactccgtgtaccgcttccagatgctccgcatgcatcaaaagtccggcaaactcataacggtacagttcaaggccaaacaaaactccgatgcccacatcgtcaattcctccttccatcgcgcggtccatggcctccgtatggtagcaataatcgtgtttcggccctgtcggatggagcttttcatagctttctttatgataggtctcctgaaaaagaatatatgtgccgataccggcatcctttaatttcctgtaattctccactgtggtcgccgctatgttgacgttgaccctgcgtatttccccatttttatgcttaatgccataaatggttttaatgctctcaaggacatactcgatgggattattcaccggatcctcgccagtctccagcgccagcctcttatggcccatatcctgcagcgcaatgacctccctgcgtatctcctcctgcgtcagctttttgcgggcaatatgcttatttttcaggtgataaggacaatagacgcatccgttgacacagtaattagaaagatagagcggcgcaaacatgacgatccggtttccgtagaagtcttctttaatctgccttgccagttcgtagatttcggcggtcttctccggaatttcacaggccagaaggacggatgcctccctgtgattcagtccctttttaagcttcgccttacagattattttgtctatcagctcttcgttatttttgttggcctctgcataggccagggtttccatgatttcttcatggctgataaactcccctgctttgtttgatgatggattatacatatgattttcctttctttggagtcaggaatcccggaactctcccggcctttctccttagccaatttattgtaacagttacaatctatagtctccacggccgactgccacctcatatccgatagccttcatgctctcttttaaagaattcaggctttcggcggcttcgtctcccgtgcagattttattgtcatagagcaggtattttttcctgacgccaagaggtgacaaattcggcatcaccacattggcgcctgccagcattcccagctcccttccctttggatgaatggttccaagcgccgtggtcgccggaagaagcacccttggcagcatcaggcggattaatcccaaaagccataatgtctcttcgaaggcccccgccctttcatccctgaacggagtatcatgctggggaataaaagggccgattcctaccatctggggattcagctccctgataaatgccatatcctttgccaggcactccggtgtctggcccggagaaccgaccataaagccgcacccggtctgaaaaccaatgcgtttcagggttctcaggcactccattctgtgagccagtgacagaccgtccggatgaagcttgccgtaatggtctgcatcggccgtctcatgccggagaaggtaccggtcggctcccgcgtcgaataaacactggtatgctgcttcacttttttcccccagagaaagtgtcacggcgcagtccggaaattcttttttaatcctccggattacgtctgccacccagccatccgtcattgccggatcttcccctccctgaagcacaaaggtcctgaatcccagactatagccattttcacagcaggagagaatctcatccgcagtcagacggtaacgctgcgcattctgattcccgcggcggattccacaataataacagttgtttctgcaataattgctgcattcaatgagtcctctgatataaacggcttttccgtattcgcgctcccgcacggctctcgccttttcaaacaaatattgcgacagctccggtgtccgcccctctatcaggcgaatccattcctccctgctcagttcctgtgtttcatagagcttgtcaatcaaagctttccgttcgtatctgccggatccgtcacttcctgtcgccgtcttctccgattcctgtttacccatcacgctttttcctccgcgccttccctggaaccggttccctgtctggatgtctttgaataaacggctttggatgtcaccccgtccagcatccccagttttccagacaaagcgctgataacatctgcgggagcgtcaatcacaacacttataatatttactcccctcttatgatacggaatccccatgcggcccacgatataaccgctgtattggtgaagcagtttattcagctcctccaccgagttctccttctccaccataattccaattagtgcaactcttgaatccatattttctcctctctgtgccaaacaaacattggtccatcctgccgccgcagtgcgatcctccgcggagcggtttttatttaacagaagagttttcctgttaaacaagcaagaatcccgcttcgggattctccgcctgcggcgggtcgcttcggcgacataattccctgccgccgcagtgcgttcctccgcggagcggtttttatttaacaggagggctttcctgttaaacaagcaagaatcccgcttcgggattctccgcctgcggcgggtcgcttcggcgacataattccctgccgccgcagtgcgttcctccgcggagcggtttttatttaacaggagaactttccggttaaataaaaaagcaccctgaaaaagggtgcaaaaataccgctgtctgctcctctttcacttcagaatcctctttgtgtcagcgcaacatcttaattctttcagttatcatcctcaccgtcagagcgaatctttcggcctggaatatttttttaatcgtatcatagaaaaaccggggcgtcaacgaagaaaacgcaaaaagacatcgccgcagaccggataaccggtcctgcagcaatgtctctgtgttttaatagaatgccctatcacaggaaagactaaaattagtcacatgtatatggcataagagcgatgtgtcttgctctcttgatagctactgtaagagccctctgatgttttgcacagtttcctgtgattcttctcggaaggatttttcctctctcagatacgtatctttttaatttgttaacgtctttatagtcaattactccgtttttctctccacagaatacacaaactttttttcttctgcgcatgccgcctcttctcatcttggaagcgtctgctctatcacctttattgaatgccacttaagttacctccttcacaaataagctgttcatacagccctcgtccaacttacaggggaccgattcccgtctttagttgaacggaagaccttcatcctctactccgtcaggaatgttcatgaaaccatcgccaatcgcactggatggggccggacgttctgccgggcggtaaccgccttcatttccgcctgccgcattcttgctctctgcgaattcctgatcctctacgattacttctgtagtatataccttctgaccgtctctgttcgtgtagctgccagtctgaatccttccggttaccacaaccttggttccctgatggaaatatttttcagcaaactctcctgctctgtcgaatgcgacacatgtaataaaatctgctgtctgtgcgccgtcatctccgccgcttctgcggcctcttctgtcaacagccagagtgtatctggcaatcgccatagcgcgttctccctgggagtatctcacttccgggtccctggtcagtctgcccataagaataactttattcatacgatcactctttctctatttatgcatcctgtcttacgcataagtatctgattaccggctccatgatacggatgtgtgcctcaacttcgttcgggcatacggaatcagactcgaaatggatgaagtagtaaaatccttctttcatcttctgaatttcgtaagctaatctcttcttaccccattcatcaatgtcaacaactgtgccgccgaaacgtgtaatataacctgtcaccttttcgattgctgctgctctctcttcatcttcgagttttgcgctaagaacaactgctaattcatatttgttcatgctctttttacctccttgtggtctctgacccctgactccagcagggagtaaggattttagttaatatatcacgaatatttatgatatcaggttttcctgttatttgcaaggtttttttcttattttctctgtatttctgccattttctttttaattctttctacctatataaatgaaacattttataaaagacttgtttgctgggtatttatatggtatatttttgttatatatttgtaatatccttaaaataccccgcaggagaggatcatatggtaagagttaaacggttggaagaaatgctgaaatatatagaaacgaacggaagcgtttcactcgatgagttatgtgaagtttttcaaatttcaaaaaatacagcccggcgcgatattgacgaagtattgaaaaccgggacgattaaaaaaatttacggcggagtcagctttatcaccccggagattaaagaaccgcccagaaccagctacagtctgcgctccgctgataatatggcagaaaagcgggccattgccagacttgctgccgaacagattgaagacggcgacagcatttttgttgatgcgggaaccaccaccggcagtcttgtcgaatttatcaaagataagaaagagcttaccgtagtcacaaataatctcgacttcattatccaggcgctgccctataaaaatattcggatcatcgtatttggcggaatccttgagcgggatattatgtccttttctgccctggatgaaatcggcgctgaaatgcttaaaaattataattttaagaaagggtttttctctgcgaccggagtcaccgttgaatacggcgccatgaactcccgtcttgccgaaaccgcctgtaaatcaaccgctgcgaattgggcccagatccgctaccttcttgtcgatcattctaaattcggcagggtgacaatcaaaagttatgcacctttgaacacttttgactacctgatcacagaccggctgccggataaagaaatcaccggcgcctatcaggacgacagacataaaatactgattgccggccagtcagaataaaaacataaaaagaaaacctaatctccgcttttgagagattaggttttctttttatgttttattgttccaaaagggagaaccaagatacggattgctcatcggcaaaggatattggtaatttttggtaatatactcattccgtttgagtagttttctatattttcactaaaatatattaataactttacaataagatattgaaaacatcaccataatgtgttaacatagccttagataactattgtatacgtttttatgggaggttattttatgaacagaagaattttagcacctactgttatgctgtgcggtatgcttctttttaccggatgtgcttctgccggagattccagtgctgccacaaaaccagatacttccggcagtaatgctgctgcacccgaagctgaggcatctgtcccggcggacggcgcgtttgaaaccatgaccttgaaagctgctcatgtttttcaggaaagccatccaatccacaaaggaatggagctgtttgcccagcgcgtaaatgaaaacaccggtggagccgttacggttgaaatttatcccaacagcgttctgggcggtgaaaatgaacagcttcagcagttaatccagggatctatagactgtgatatggtgtccggcgtagccatgtaccagggatatgacgcccgcgctggtattgaggaccttccgtttttatttacaagtgcagaatcagcccacaaagctttagacggcgaatacggggttaaacttgccgaagaagttctggaacctgtcggtactaaagtaatcaactactgggagaacggtatgagacatttcaccaatgatgtccgcccaattgtcactccgtccgatatgaagggaattaaattccgatccgccaattccccgatccgcattaaaatgtttgaggcatgcaacgccagcgttgttcctatgcagttcagcgaactgtacacagccctccagcagggtactgtacaggggcaggaaaatccgatacctctgattgaaacctcaaattttgatgaagtgcaaaagtatctgtccttatcaggccatatttataatgccacagtcctggccttcaatcccgacaaatggaacagcctttcacctgaactgcaggaagtcatcatcaatgctgcaaatgaagcccgcgactatgaacgtgagttaaacgcaaaagaatcggatgatgcggtagagcgtctgaagtcgaaaggtatggaagtgaatgaagtcgataaaagcgcatttgtggaggcagtacagcctgtgtgggataccttcaaaaaagagaacggctccgaattaatcgatctggctgtatcttataatgattaatccctgtctgctcaccgctttgtgtccatgcaaagcggtgaaattttacaaaagaggaggcggacttattgaaaatgctggataaaataattgtgtgtattcgatggatttgtatgttcttactgattgagatggttgccgttatcttttttcaggtcgtatcaagatactgtttcggcattgcccatttctgggcagaagaaatggcggtcttttccatgatatggcttgtatttctcggctcagtcattgcagagtcccgaaatgatcatacgcgtatcaccttctttgtgaacctgctgcccggcgggctgcgaagatatgtgaacagtttttccgacttactgtgcatacttttcctcgcaatccttactgtaaaaagcggtgatgtcatagctattgccatgaagaatatcagcaccggagtcagaatcccaatgggcgtggtatatctgtcccttcctgtgggaggtatcctgatgagcctgtatttcctggcagatattgttaaaaacttccgcaccgataaaaaggaggataaaccatgatagccgtactattcattattctggttctctgtctgttcatcggcgtacccgtgggattttcaatcggaataagcgccatgtcgtttttggcagtcagccagttcacgcctgttaccatcatggctcagcggctggtggacgggcttaactccttcccgttgctggcactgccgttttttatcctggcgggtgaaattatgtcctatggatgtacaccgcgactaatgcggcttgccaacctgttcctgggtaaaaagcccggtggtttatgcgcagcaggcatcactgccagcgcatttttcggtgctatctccggttccggagtggcatgtacagcagcaatagggggaattgtaggtcccgaaatggctaaaagcggatataaaaaggggtataccgcctctgtgatcgccgcatccggcactctcggcatcgtaataccgcccagccttccgatggtaatttacggcacttcctccggaacttccattcggaatatctttatggcaggcattgtccccggccttttggcaatcggctgcctgctggttatgaatcgcattatttccggccgccgcggttatggaggacaggctgaaaactatacgaaggaggagaaacggcatattataattgatgccattccctcgcttatgatgcctctccttgtcctgggaggcgtactcctgggtattatgacaccgaccgaatcagccgtcattgccgttgtctatgcgtttatacttgcatttttcgtatatcgggaactaaagcttaaggacctgctgaacctttttacatcggcggccgtcactacctccgtaattatgctgattatcggttgcgccgctcccttcggctggctgcttgccataaataacgttcccaatattataactgaagccattttaggcctgagtaccaatccggtcgtgattatggcgctcattacggttcttttattattccttggaacctttatggagactatctccattattgtcctgctgacaccgatgctgctgccggttgtcacaaaactcggtttcagtccggttcatttcggcgtcatcctgatactcaatctggctatcggcggcactaccccgcccctggcggtctgtctgttcactgcctgccggattctgggcatccagattgatgagacattcccggatattctttatatagtgggaacactgatactctgcctgattctcataatcgtcttccctgccatcacggttggactgccgaatcttttaattggctcatagaccggattgcatccatatgatgataaacatatttttataatagcaggaggaataaaatgtttaaacaactaaactttgatccgtcaaaatcccgcggtttggcagccctgggccgctccggggtagatctgtacccccagcaattcgcgccgatggaaaaagtaatctcttttacaaagcacgttgggggatctcctgccaacactgctgttcaggccgctaagatggggcttgataccgcctttatcggaaagatttcccgggatcccctgggtgcttatgtaaaatattatcttaactcggtgggggtagacacctcccacctgacgatggaggaaagcggcgagaagagacagagtcttgccattgcggaacagccggagcgcggcaggatcagctactttttttaccgtcaggatccggcggatctgtacctggacatgaaggatatagataaagcattcatttcccagtttaaagcgctgcttatatccggcgcttctctctgcagaagcccggccagggaggcggtgcttcttgccatggaatacgcgcaggcaagcggcgtccggattatctttgatcccgactacaggaaagacggatggaacagcttggaggagacctcactttattatcatcaggcagctaaatatgccgatatcatcatttccacacgagaagagtttgatatactggagtcactcacacatccaggtaatgacgatgaccgcctctccgcagaagcttatctgaatcaccgcgcctcccttgtatgtatcaagcacggcgagaacggcgcaaacgtctttacttcggacggcaggcagttccacggccctgtgatgccggcgcgcgtttataagacgctggggccggtgactctttctgtggtacatttattgccaagctgataaatggacatccgattgatgaggcactaaaatatgcggccgccgccgcgtcaatcactatatccgggaaaagctgttccgactccatgccggatcttgttcttttagacagctatatgcaggcatggatttccggccggattgaatcctgggacggctggaaatcaatcgagaaaggagaacaaatttaatatgctgactactttttcaggtgtggggaaaaccacacggataaacagaatttttggaaatgacgggaaagcagttatggttgccgtcaatcacggtttaggactgggacccgtggaaggaatagagaatatggagaggacactgggacagattatggagggaggaccggactcattaaccatccacaagggaattgccatgcactataccgatctgttcgccggcagaactgctcttgtcttaaaatgcacgaatgccacccgataccgttctcctgaagaaacggcaattgccaccgtggaggaggccgtcactctgggagcggatgccatagcggtgggcctgacactttgcagcaaagaggaagatcgggaaattgaacgggccgctgcttttattaaggcggcgggacagtatggcatcccgaccgttacacacagctatccaagcggctgcttacttgacgacagtgaacggtacggcataaagaatgtcggatatgcagtgagagtctccctggaacttggggtcgatatcattaaaagcttctggacgggcgatccggacagctttgccaaaattgttgagataggctctcccgccaaagtagtgatttcaggagggccaaaatgcgaaactcttctggaatgctttgaaatgacacagcagggaatggttgccggagccgcaggcattacatacggacgcaatatctggcagcacccgcatccggccgccgttatcaaaggcctgagagccatcgtccatgaaaatgtttctgcgaaagatgctcttgatattgccggagaactggccggacataagcttatgtaaaagaagcccctcaaatagccttctgaaccagtccccaaagcagcaaaagggctgttataccagtttacacaactgatataacagcccatggcttatgcttccttctttttaagtcctctcgcactcttttccaccagggttctggccatcatgacctgatggccgcagcccatgcatttcaggcggaaatccgcaccaatgcgcagtatctcccactcataactgccgcagggatgcggttttttcagtttcacgacatctcctacttcatatatcattcaaaagtctccctctgacaaattttattttaatccgttatttcaaggacgtcattgatccagccccgccgcatcacccaaaaccttgccgatactgtcacaaatcacaagatctgcctggccgtccctggaggtaaccgatttattaatcaaaaccagcttggagccgcgatagtaatcaatcagtccggcggccggataaacggtgagggatgtcccccgatgattaaaacatccgccctgctgatatattcgaccgaacgctgaataacatcctgatccaatccttcctcatagagaaccacatccggctttatcacaccgccgcagtcacagaccggcactccatccgcttttaagatatcatcaaggctgtagaatctgccgcacctggtacagtaattacggtgtaccgagccgtgcagctcaagcacctctctgctgcccgccgcctggtggaggccgtcaatgttctgggtcaccacggctttgacctttccttctctctccagtttggcaagagccatatgggcccggttcggctttgcctccggaaacagcatcttatttttataaaaccggtaaaattccttcggcttttttacatagaaagaatggcttataatcgtctccggaggataatcatactgctggttataaaggccgtccgtacttcggaaatctgggatgccgctctctgtcgacactccggctccgccaaaaaacacaatattgctgctctcttcaatccatttttgtaaagctgccgtttcatccattccgaattctcccctttccctgatgcagcccaaagactttcaggttctatactatttcgtctatgaatacgttattgaccgtgtctatcagctccagacgcccggctttctctttcgaaatccccggccagatttcctcaggcctttcgtatccgcagagccatcgtatcagttcacccggtgccgcagtcaacacatccctatcgtccgcgtcccatgtttctgccgtcttaacagccgacgagctttccgccgaaacagtccagacataattccccttcaccgcctccatcagcccgtcttcaatccgtatcttaagctgtaattcttctcccggctcacggagggtaaacaatgacagaaatgcttccgtgcaggtcagacgtgccataatcatcggtttccttccggtcacgccgacattggtttcatctgtataaagaagacgctggaccttgcggccgtctccccagcttgccttaagacctgccaggctatccccgtcgtaaagaaattccataatcccgttctcagaatccagttctttcaaaagacggctcacgtaggctccgtcgcggaggcaatacatgtcaaaacgagccgaaagccattgttccataaactcggccgctttttggcagtcttcctcattgtcatggcatacgaccgcagtcagccgttccttcgcctcccgggtcagctccatgagcggaagttcgcacatgtaggcgaaatcaagcggcagatagatattggcatcagccggcatcaggaaaaggaacggaaccttctcctcattcatatcctgcatcatctgcagaaatacgtctctgaaatggccttcacggcgtcggccggcatctgttgccacacccacaacatagaatgtatcaatctctttatccttcatactgacacggtacggattgagctgagtcatcgaaacaatcaggccgctgtctttcttaaccaggattctgttgtcttttgtcttttccgaatagtaatattcaatgaacttgtccgtatcctccggaaaacaggaatgccagagacgttttgtctcctgcttttcattgtcggacagatactcgattttgctgccggaaatcgtattgccaatctgctcagcccaacggtagcctttctttccgtccagcaactgctcaacaagatattttctcgcatagtcggccggataataagaagctttagccttcctaagcccctccaggcccatatcgtcctccctgttgacccattccacatcagcaaattcttcaatcaggaactgctggttgatgaactggtataacccgttaatctcgggatttgctttctcgatatggataaccgccatattctctatcgggttatagcttccgattgtaaaagcctcaagctgcccgtcaataaacacgccgcccatacggacatagagggaagaacagtttttaagaatgtcatgtataccccggacttcataatccagatgctcctccacatcgtcacccttctgtaatctccatttatcgaggaattcccacacttcatggctgtcggaacagcagaggcggcggtaatcataacgtccctcatattcccgtttaaatgcattaacccggttctttttcttatgcagcttcttgccggccagcgtccgcatcgcgttgccgtcatagagataatccttggaatccacctgttcttccaccagatacttgtcctccggcagattcagatatttcactgcaaactcatccgccagattaatcaccagcgggtaccccaattcctcgttaaaatatgtctcaatcgctttgaacgcccccggaagatcctcctcccggcacagcggcattgcagaaaagcacttgcctccgctctccatcagccatagaagcgctttcccctcccagattgcatatctgacatgatagtactctttccatataaagctctccaaaaatacgctgtcacacgttctgttatgccgcaaattataaaagggaagtaattcttccagattgtctatattaactgtcttaaactgtaaattcatgtttcctccttgccgtattaaatagaaatcatctatgttattatatcatacattatattataagtaaaaaaagagttttttaacattttataatcagtttttaaaaaaagatggcaggcacgccgggcgttcctgccatttactgttaaatttttattccaattacaattagatattcaggtgtttttacgtttccagtcatactgcataaactttgtgtgccgcctgattgcttttactcccacttaaaaaacaaaaatgagactgtgacacagataactgccagagccgccataattaatgccggcacggcagcattttcagggggcaggccaagacaggccgctttgagaatttttatcccctgtgtaagcggaagaacgttggcaaccgtctgaaaggccggcggcattatttcataaggaagagttgctcctgagaagataagcatcggaaaataaagcaggctggcaataactccggctgactttgtatccggcgctattcccccgaccatcattcccagactaaacatagaaaagataaccaggatatatcctcctaaaaaatgtacaaagcttccgcgcatctgaaatccaaaaaacatgttggcagtaagatataaaagtatcagcgatatggccgaatacaacgtgtagatagccacctgcactattaaaatcatggcgggactgaccggtgtcgcccggaaccgttttaatatcttcctgccccggtaatctgataccaccaacggcagtcccatcactcctcctgcacatatcgatatcgtggcaagcgcaccaaaagactgatccaaaaacgtatattccgctccttcgaatgcgggcttaccgccaaaaatcatgcctattatcagcaaaactaccaacggcataataatggcaaatatcagcatatccatgcctctcagcgacagcttcagctccgtcttcaacatcaccctaaaagtcttcattagtttctccctcctctcctgcaaaccaaaggtatgcatcctccagcttctcatatggactctgcctgattgcctcagaaaccgtgccgtaaaatacggcttttcctttttttaatatgcagatctgatcgcagaggacttccacctcatccataaaatgtgaggtgagaaaaattgtcagccccttattttttaactcttcaagaattttccagacctcacggcgggctttaacatccagccctgtcgtcagctcatctaaaaaaacaacctccggatcaggaatgagcgccagtacgatgaacagtctctgacgctgccctcccgacagctcactgaccgcgctctttagcttgtccttaatcccaaagcgtctcagcagttccggataatcggccggattccgatagagagaggccgtggtctcgcaaagctcctcaaccgtaattttgtcctggtaatgagcttcctgaaattgaacgcctgttttttcaaatatctgttttctctgcgtaaacggattcagtcccaagatggagatctctccgctgtccggtttctttatgccgagaatacactcaagtgcggtactctttccggctccgtttgctccaagaagtccaaagaccattccccggacactgtcagggatacttctgctacggctgtctttccgccatatgacttcgacagtttttgtactttaattacgtccttcatatcatttcctccttacttcacaaaaagaataccaccaatcaaaacattggtggtatagtggagggttttaaaatctctgtttcatgtcggccagcatattctctatcaaaaccgcattcttatgcgccgcgttcagtgaagagattaatttgtcgcatacgctgataatcgtatcatcccgggaaggcgtatcaagtgctttccggatatccgcctccggatcctgtgaaagttctcccagcattcttaaaattgcttctaacgaataatttgcacatcggagggcacgtatgattttcaggcgctgtaaatcctcacccgtatagattctatatccatttgctttccgcttaacagaaagcaggccgttcatctcccaattgcggagcgcgtccatagaaatgtccagggcttccgatacttcacgccttctcagataaggtaaaaaagcatcgctttgtccggcgcctgataaaatctgtctcgtaatacggattgcctcttccgctccatggcgttcctgatctatctgagccagatattcccgtatcagcgtgatggcgctgtcaaaatcacgttccgccgcagtcttgaccatccggatcattttctttctcaggccgttttgcagtacttcgattttaaaagccagtctgaccagacgaagctgctgcagatggaagtccgtaaaaacacggtatccattcggcagtcgctccggttttggtatcaattcaagttcttcatacaatctcaccgtattaggatgtacgccaatcagagcagcaatttcagatgttctaaatgtctcagccatttattcctcccgtatttctcccactaagctgaattcatgggcaggcttggcatattgacgtcctgtaatcacactggcagttaagtccgtattattataaataatcgaccattgtgtggcgttgagtcgtcccgttgtctccgacacatgccagtcacttgaagccgcctttagaaggtccatggcagcctgctcatccttcaggacacccttacattcatccagcgtatttttcagaatctcataccgatcctgaccacttccaaaattatattttttatcagataataaaaaattagtgaccatctgataattgtttttggccggtatcacttcatattcgttgtcaacatattcaaccaccacactctttccacgggcatccgatatctgaaaatgataacagctgcccgctgaagaatgcatatcatactgctccagtaaagccaaagcctcctccacatcggccgctttatccagcatgagcctgatagccgtggtggtcgtgatatcgactttacccgtatcctggtttgtcggctcgtcgccaatacgcagaactgccaccgtcagccccttttcattaattccgtccaaaggggcatagggcgctgccaatgtgattatcttctctttaaaggtttcaggaagtttatcttctccaaaacccagaaatgccagattgactgtggacagagaacggtatccgttttccggctctgtctcgacaaataacgcaggggaatatgtcaaatcaaaattccggccaaaaatctgatctccatcctctgtctgtgcgctgaatgttgaacatcctaaatcagggatagagaattccagaggtattccttttaaaagacgctctgtcacaaatttgactaattcaccatctgtagacgccccaacctttaaaaaatcgtcaaagccataatcaccctcgtatttcattgtatacaggacattatcatctatcttcttcaaagaatccagtgttttcaactcgtttctaaacaaaaccgcacctcctgtcactataatcagtgccagcgccgccaggcatcccacagcgcgcagcagccattttttccacttactcctcagcataattctctttctcccttttaatatggtaacttatattcgatatatattcatgcatataaaaagaaccatcacttgatggttcttaatagaggcgacgaccggattcggaccggtgataagggtgttgcagacccgtgccttaccacttggctacgtcgccagagtgaccccaacgagattcgaactcgtgttaccgccgtgaaagggcgatgtcttaaccgcttgaccatggggcctcttaagtattaaattttatgatacaaaaaaactccccgagtaggacttgaacctacgacagcgcggttaacagccgcgtgctctaccgactgagctatcgaggaataaaggggaatgtctggctctctgaaacaaggctccctaccggttatcttgcccagatttccattacatataccttcaaaaccacatattgaaattcatccgtttaaatcataaggaatcgcttcctctatcctatccttaacctaaccttttggttaagccctcgaccgattagtaacagtcagctgcacatgttgccatgcttccacctctgccctatctacctcgtcgtcttcaaggggtcttactcttgcgatgggatatctcatcttgagggggcttcacgcttagatgccttcagcgtttatcccgtcccgacttggctactctgccatgggtttgatacccaacagatacaccagaggtcagtccatcccggtcctctcgtactaaggacagctcctctcaaatatcctacgcccgcgccggatagggaccgaactgtctcacgacgttctgaacccagctcgcgtaccgctttaatgggcgaacagcccaacccttgggacctacttcagccccaggatgcgatgagccgacatcgaggtgccaaaccactccgtcgatgtgaactcttgggagtgataagcctgttatccccagggtagcttttatccgttgagcgatggcaatcccactttcataccaccggatcactaagtcctactttcgtacctgctcgacccgtcggtctcgcagtcaagctcccttatgcctttgcactctttgaatggtttccaaccattctgagggaacctttgagcgcctccgataccctttcggaggcgaccgccccagtcaaactccccacctgacattgtcccaccaccggatcacggtggctggttagaaatccagtatcacaagggtggtatcccaacagtggctccaagaagactggcgtcctctcttcacggcctcccacctatcctgtacatgcaataccgaatcccagtatcaagctggagtaaagctccatggggtctttccgtcctggcgcaggtaaccagcatcttcactggtatttcaatttcaccgggtgcattgttgagacagcgctcaaatcattacgcctttcgtgcgggtcggaacttacccgacaaggaatttcgctaccttaggaccgttatagttacggccgccgtttactggggcttagattcaaagcttcgcttgcgctaacctctcctcgtaaccttccagcaccgggcaggcgtcagcccatatacctcaccttacggttttgcatagacctgtgtttttgctaaacagttgcttgagcctattctctgcggcccactctcgtgggcaccctttatcccgaagttacagggtcattttgccgagttccttaacaatgcttctcccgccggccttaggattctctcctcatccacctgtgtcggtttacggtacgggtacatatcacgcaatagcggcttttcttgacagcccctacgccaacttcgctactaatgttcgctacgcgtcacgtcctcctgttgttaagcggatttgccagcctaaccagtcctacgcttgccccggtcttttcattcccgggtttgacttcggttctgtgtccccacagttctgatgatatgcagtacaggaatttcaacctgttgtccatcgactacgcttttcagcctcgccttaggccccgacttacccagagcagatcagctttactctggaaaccttagatattcggcctggaggattcccacctccatctcgctactcattccggcattctctcttctatacagtccacagctccttgccggtactgcttcgctccgtatagaatgctcctctaccaatcatattaatatgattcctaagcttcggtgttgtgttttagccccggacattttcggcgcaggacctctcgactagtgagctattacgcactctttgaatgtgtggctgcttctgagccaacatcctagttgtctttgaaatcccacatccttttccacttaacacacactttgggaccttagctgtaggtctgggctctttcccttttgactacccaacttatctcgtgcagtctgactcccgtacatcatctgtctggcattcggagtttgatattcttcggtagactttgacgccccctaggaaattcagtgctctacctccagcagactaatacgaggctagccctaaagctatttcgaggagaaccagctatctccgggttcgattggaatttctcccctatccacacctcatcgccacccttttcaacggatgtgcgttcggtcctccattcccttttacgggaacttcaacctggacatggataggtcacccggtttcgggtctgcacatgctgacttgacgccctattaagacttgatttctcttcggctccgcaccttaagtgcttaaccttgccagcatccgcaactcgccggaccgttctacaaaaagtacgcggtcgcaccttaacgtgcttccacagcttgtaaacacagggtttcaggttctttttcactcccctcccggggtccttttcacctttccttcacagtactatgcgctatcggtcactaaggagtatttagccttggggggtggtcccccgacttcccgcaaggtttctcgtgtctcgcggtactctggatcctgctgctgcctattgttttcatgtacggggctttcaccctctctggctggtctttccaggaccattccattaacaaatcggctcacgtatgcagtccttaaccccagagtgcacgcactctggtttgggctctttccctttcgctcgccgctactcaggaaatcgatgtttctttcttctcctccgcctacttagatgtttcagttcagcgggttcccttccatacgttatggattggcgtatggatacttgaggtcttctcaagtgggtttccccattcagatatctccggatcaaaggatatttgctcctccccgaagcttttcgcagcttatcacgtctttcatcggctcttagtgccaaggcatccaccctgcgctcttattagcttaaccaattgacttccacctgcgggtgcgggttttggtctaagattcatagcgttgaatctttggtttaggtttacaataaaatttttggtttgttttggttacactttcgtgtaacacctcggatgtcttgattttgtctctcttttctcccttgtggcaagccactcggaagagtttcgaaactctatctagatattatttcaatatgcagttttcaaggtacatgctgtgcgcgttcactactgcgaagcgtccgttccaaagccttcagctttcgctcgcgcaaatggagatggagagattcgaactcttgaccccctgcttgcaaggcaggtgctctcccaactgagctacacccccatgttctgtaatcaattgttttccatattgattacctgcttacatgccatcatgccaagcatgattcctatgcatgtaacacctctcaagagatgcgggtctaccctaattaaaggcgatcccatatttatttcatttattatattgaattcagccgtttatcctgtcagtatgctgttctcgttccacggcattaccctctcgggtaatgggcttaagtggactcgaaccaccgacctcacgcttatcaggcgtgcgctctaaccggctgagctataagcccattaatctggcagccacctgctttcccatatcgtctccaatatagtatcatcggccgcttaggtcttaaccatcgtgttcgggatgggaacgggtgtgtcccctaagcgcatcgccaccagaaatgttgtttccaggttttcatcaattgcagctccaaaagctgcgcaattgactcgatatcctcgaaaactcaacagtatataaaacctttacttcttcttccttagaaaggaggtgatccagccgcaccttccgatacggctaccttgttacgacttcaccccagttatcggtcccgccttcggcagctccctccttgcggttgggtcactgacttcgggcgttactgactcccatggtgtgacgggcggtgtgtacaagacccgggaacgtattcaccgcgacattctgattcgcgattactagcgattccagcttcgtgcaggcgagttgcagcctgcagtccgaactgagacgttatttttgagatttgctccacctcgcggtcttgcttctctttgtttacgccattgtagcacgtgtgtagcccagatcataaggggcatgatgatttgacgtcatccccaccttcctccaggttatccctggcagtctcccaagagttcccggccgaaccgctggctacttagaataagggttgcgctcgttgcgggacttaacccaacatctcacgacacgagctgacgacaaccatgcaccacctgtcttctccgcccgaagggaaggggacgttactcccccgtcggatcgatgtcaagacctggtaaggttcttcgcgttgcttcgaattaaaccacatgctccaccgcttgtgcgggtccccgtcaattcctttgagtttcattcttgcgaacgtactccccaggtggaatacttactgcgtttgcgacggcaccgaagagctttgctccccaacacctagtattcatcgtttacggcgtggactaccagggtatctaatcctgtttgctccccacgctttcgagcctcaacgtcagttatcgtccagtaagtcgccttcgccactggtgttcctcctaatatctacgcatttcaccgctacactaggaattccacttacctctccgacactccagttaaacagtttccaaagcagtcccgcagttgagccgcgggctttcacttcagacttgctttaccgtctacgctccctttacacccagtaaatccggataacgcttgccccctacgtattaccgcggctgctggcacgtagttagccggggcttcttagtcaggtaccgtcattttcttccctgctgatagagctttacataccgaaatacttcttcactcacgcggcgtcgctgcatcaggctttcgcccattgtgcaatattccccactgctgcctcccgtaggagtttgggccgtgtctcagtcccaatgtggccggtcaccctctcaggtcggctactgatcgtcgccttggtaagccgttaccttaccaactagctaatcagacgcgggtccatcttgtaccaccggagtttttcacactgtatcatgcgatactgtgcgcttatgcggtattagcagtcatttctaactgttgtcccccagtacaaggcaggttacccacgcgttactcacccgtccgccactcagtcaattcaacttccatccgaaaacttccgttaaatcgcttcgttcgacttgcatgtgttaggcacgccgccagcgttcatcctgagccaggatcaaactctcatgtttaagttttgattccgttcaaaaattcgcttggctaatttttaaaccgtattactgttgtttggtttttttgttctgaatgttctctcgaacttctaggcttaaccaaaagcctttgttctttaagaattttcaaggttttacatactgttcagttttcaaggttctttgttgttgcctcagcagcaactctgatagtatatcatcttgccagccgtttgtcaacaacttttttctattttttccaactttctttttttcaaatttttacgcttctgttacccggtgttcatggattcattcctgaaacttccttgataatgaaaagataatttgatatttgaagttgtgtttcagcgtttcaatcacgctggaattaaaatataccacttgtccctcaaaatgtcaagggaatttgtagctttttttcgaacaattttttatttatttcccgcaccaccagatatgccattttttcaatatatcttctatattttgtggtgcgggttttggaatataattttccttatttttcctgattccggattattgtatcttttgtcgtaattatttctactttttctaaaatgcaataaagccgccatcctgtcaccccgccttgttacaggatggttttaactacggtcatcacaaagctgcccaacagattatgattatatatataagaaagaaaagcgctgctctctatctgttgaatcaaagcccttccgccggcggttcctgagaaggcggttataaacaggcagatgatccagagaaatatgagtccttcaattcctcccagcagtccgcccgctattttgttaatcccggaaaggattggcaatctggctaccagatccagccagaccgtaagaatgttaagcgcagcgaagacaaccacgaataaaaccagaaaccctacaatgttaaggatactgttcgccaggtaactcgccacgtactgggtaaatgtatctaccccagtaccttatacacttcattattattgttctccagcagcgcatcctttaactgcttcggcagttccagcccttcgataattgaacgctgtccggatggttcctcagaatcggcattctcatccagcttcatcgcatctttcatgctctgttcaaatgaactgtaaatcttagtattgtttttcagaaaatcggtgacctggggcattgcaacatggattgttgcaaaagtgattatcaaggcaactgccgataccgctaatttgataaatcccttgtagtgtccatataataccatcccgattaaataaactgcaactgcaatcgataaccagttttccattactacctcttttcccggtaaatatcccggcatcttattgcttccagaaaaaagacatggcgctgcagtaccaattcccctgcagcgcctgctatctctacatgaacatcaatcaaagaaatgcttttcttttaatatcaacagcccgtctttatcgtatttggaagagaacatacctccaaatgaacgtttctccgctttatctgccgcttcttctattaaatcttcggcatttgctttcgtcagaggcacaccgtcctcctccatcatttccgctctctcataaagagcaagcatgctctttccggaaatgctgcaatcgatctcagcagcatatttgcacgcatactgggcaaattcttccacatccatctcgcttccgtcgtccggaatacgttcgattctttcgtcttcttcctcttccggctcttccggttcagcatcagcctcatcctccgcttcatactcgtaacggcgctggtcttccatctcctgctgacgtcttattaaatcctcttcatactcagcctggcgtctggcctcgtctgcctccagctccgcctgctgctgtgccgcgttaaccgcctcgtattccgcctggcgcattgcctcctcggcttcatattccgccatgcgtctggcttcctcctcacgctccgcctgacgtctcatctcctcgtcacgctgagcctggatcctcctggcatcttccgcatcgcgggcagcctgtcgcctgatctcttcttcgcgttccgcaagtcgttttctggcagcctccgcctcgcgttccgcctgtagtcttaaaagctcttcctcacgtgccctttccgcttctgttttcatatccgcagcgtccctatgggcggcgctgcctgagccttcgcagccaatatactggaatttgcctgccagggacggatagctgttgtgcattctttccattctggccggagtgtcaatcaatacgacaatcattccggtgttgtcctgttccatcagctcactcagctcactgattgtaatgcggtccagctctcctgcacgctctacaatcagatcttttccggcaagtctttccgcaactgcaaatatgccttttctgttcagattatcaccgctgattttcgcgacgggattctttgtcccaagctcacggtgaatcgtttttagtgaatcaagagccatcttcagaccgctttccggatcttccgcttcaatcatgagatgattgcttactacctcttccggctccaaatcccagtcttctacaatcgtctcctcctcttcctcaaaacggttgattaaaggtttgtccgactcatcggctgccgccgtctccgctgccgccagttcttcatcatctaatccgccatggcttgtaagtctgtattctttaatatccctgatattatccaggactctggtttcaccggcagaagcgccttcttcttcatcataaggctccatcctcgacatctcttttgccagttcttcctctgcttttgcctcatgcagactggagaccagatcgtcctccaggaagtcactctcctccggatacatctgctcctcctccggatacattccgtcatcctccgaatccatattgcgggaggctgccctgtgacggttctcatcgtgtgcatccatacgctcgtccatatccaggccgttcatatctgcttcttccgcatcctcggaatcgaaatactcatcctcctcttccggttctcttctgagggtcctgctgttatacttctcttccacggcgcgcagcttttcttcgtatttttctctgttttcgactaaatccatctggtacttggtcagaggagcaaactgcagcttcagctccatcgccttatccacatactttccaaggccgaacatcagcatgattctgtcacacatgttgacacactgcgtttccattccggcctgctgataaagctcagccagatgatacatccatttctcatccagctcttcctgacagtatttctccagtgagtggattaactgctcaattgtggctcccttcgcttccaatataagaaatcgcagaaggttctgtctcggatcatctaccgccagatcacagaactctctgtaatatgcctccgcctccggcacattcccttccctcagggccaaatccgtgagcttaaataaaagccctttgccaattggagctcgctcaaaagccagcagcagaatatcttttgcatcctggtactccgcatttctttcatagacctgggcaatcgtcgtaagcaggctggtgctgcgaactcttctccagtctattgtatccgcgatcttcatcgctgtttcatagtcgcctttattaaccagctttttaatctgttcaactttgatgttaaactcgtacttatccatctcttttgcatctcctaaccgcctgcaccatacagacgacttaatcgttacagttccgtccgcccgtcaagagccctgagcagcgtaacctcgtcaatatattccaaatctccgccaacgggcactccactggcgattcttgttaccttaattccggtaggcttgatgagcttgctgatatacatagctgttgtctcaccttccaaactcgaatttgtcgctataatcacttctttaacgtcgtctttttgcagtctggtcattaattccttcagcctgatatcattcggcccaattccaagcatgggggagatagctccatgcagaacatgataaaccccctcatattttccggttttctcataggctgccaaatctctggtattttccactaccatgatcgtcccatgatcccttctgtcactgctgcatatcgggcacagttctttgtctgtcaatgtaaagcattcactgcagtacctgacattatgcttggcgtccaccatagccgaggacaggcgctccacctgctcagaaggcatgttaatgatatgaaatgccagccgctgtgccgatttgcttccgattccgggcagctttgacagctcttctattaattttgtaatctgattgctgtaataatccatatattagaacgggaaaccgcctcccaggccgccgattccgcctgtcagtttagccatcgctgcgctgctttcctcttccgcctgacggaatgcttcatttgttgccgcaacgattagatcctggagcatctcaatatcatcgggatccaccacttcctcagagagcttaaccgcaaccacttcctttttgccggaaacggtaactgccaccgcacctccgccggaggaggctgtgtactgcttttcctccagttcttttgtagtctcttccatctggcgctgcatcctctgtgcctgcttcatcaaattattcatattgccaggcattccgcctggaaaaccgccacgttttgccatggtgttcatcctcctgattattttcataatttatttataaatttactaccttgtctttttaatcttccactatgatatcgtcgtgaattacttttaagtcgtcgtcgcttacataaagggtcgttgacttcgcgcccgtgtcattcaggttcgccttgaaatctatacttttaccgtagtttttttcaaccgcttctttcaattcctgcatcacggcttcacggttgacgatggagaaattgccgggatcgttacatacgatgcaaagacagctgtcgcctgccggctccacctgcgtgtccctgagagcagcacggaccgcccctcccatctgtctggaaatcttctgccattcgccgcggaccagcatcagatcctcgtattgggcttttggtaatgtcacggtcttagccggatcttcttttacatccggccgcgctgtttccggggctttgatctgccccgcctctcctccctgcgccgccatcgcagccaggccggaaaattctgccggaatttcttccattctcttttctatcatattgagccgctggaggacagaatccaggttctgttccatcgacggtttcgtcagcttgataaatgcaatctctgccagaacgcgtttctggctggcatagcgcagttggcccgacagctccgaaaaaatccggataaaccgcatcagtgtatcggaatccgtcagttctgcttcttctttaagaatcgctatattctcagatgacatatccagcatgtcttccgcgtcatccgttgtcttcacaaccagcagatttctcatataccatacaaaatcattgaccatctgcgtcaaatcgcgtccctggataatcatctcttctattgtatatatgcagcccttagtatccccggccgttaccgccctgaaaagactgctgaacacactgttgtcaacggcccccaatacttcaagcacattgtcataggttagtttctcgccaaagtgaaatgcggtacactggtccagcaggctcagtgcgtctcgcatggaaccgtctgctgccttcgccacatagcgcagcgccctctcctccacatcgatctgctcggcctgggtcagctcgtgcaggcgggcggaaatcgtatctatcgtgattctcttaaaatcatatctctggcatctggaaaggatcgtgatcggaatcttatgcacctctgtcgtagccagaataaatataacataggacggaggttcctccagcgtttttaagagcgcattgaaagccccgatggacagcatgtgaacctcgtcgattatataaacgcggtaccggccctcggtcggcggatactgaacctgatcgcgtatatcacggatattctcaacgccgttattcgaagcggcatcaatctcaaccacattgagagacgcagatgaggctatctgacggcacatgctgcattcgccgcacggacttccgtcaaccgggctctcacagttcaccgctttggcgaatatcttggcaatacttgtttttcctgtacctcttgtaccgcagaacagatatgcatgtccgattcgtcccgacgttatctggtttttcaaagtctttacaatgtgatcctggcctttgacctcgtcaaatgataccggccgccacttcctgtataacgctgtatacgacatgaatatcctgctccttcttgtttccgtaactattcatctccaaaactgattcccacagatttggcttccttgataatatcgctattcggatcaaccgttttaagcttaccggcaatctcttccagcggcactttcgtaatctggctgtcgttcagggcaaccatataaccgtattcttcattcttaatcatctgtgctgccgctgcaccgagacgcgtggaaataacccggtcaaacggacatggctctccgcccctctgcatgtgtcccggaaccgtcacgcggatctcctggccggtcttttcctgaatctgagcgcccagcgcataagctaccgaggggtaggccggaccgtttttcttcttttctttcagttcttttttggtaagggccgcgtcttcccttgaaatcgcaccctcagcaacggccagaatcgtaaaattcttgccgctccttactcttcctttgatggcctcaacaacaacgtcaatatcataaggtatctccggaataaggataatatcggcgcctcctgctattcccgcgtagagagtcagccatcccaccttatgccccataatttcaacaataaatacccggccatgggaagccgccgtcgtatgaatgcagtcgattgcgttggtcgccacgtccacagcgctgtggaagccgaatgtcagctcacttccccacaggtcattatctatggtcttgggaagagaaacaatgtttagcccttcttccctcagaagatttgccgtcttctggctcccgttgcctccaagcactaccagacattctaatttcaatttataatatgtgtgcttcatggcagccactttgtccaaaccattctcgtcaggagttttcatcagtttgaacggctgtctggatgtgccgagaattgtaccgcctctggtcagtatccctgaaaactctgatggcttcataatcctgtagtctgcatacatcagacccttataaccatcctcaaaacctactatctctacgtcgtcatacattttgtacagagctttcgccacgccgcgcattgtcgcgttcaggctttggcagtctccgccgctggtcagcataccaattcttctcatggatgacacaccctttctaagtactgtattttaatcctgtcacactttatgatatcaggttacaatatacccattttgtaattataatacaatcatgttctgcgggcaagaaaaaattctttacgatcttctttactatattgtgcagaaaatcaaatttcttactgccgcgaagcgttttttatctgacacccgaatcctgttaaataaaaaagatgtatccaattccggatacaccctgcttcttacattgaattacatatgaaactattattaaatccgcacatcctgcttcgaacgtatatcacaaacgttacccttgcagttaactccgcccaggcagcctcacggcacacaagagcttctgcttagtgctgctgcattcctgccctgacacggttcacagattcctgttgcgtaagacccagacttcaacgccactttcaaggggcagctctgcaacataacgccctcggcaaggacatcacccctgctgtagcggattgcaggtacagggcaccgctaactccccggctgtgcggaaactttataacttgattatggctgatgataagtaatcttcagccagttaagtatacatggatgccgcctttttgtcaagccggagatagcgcatttgcctcaattcagggaacagttctgccataatgtattccgcgaggtgttctcgctgctttttgaagcatgattgttccggcatctgcgagatataacaaaaaaatatgggaaatatgctcagatttcattttatattctgctgaaaaacctttataataaggataagaaaaaatcctgccccagcgctgtccgtctttatcgctgaacagaagcgccaaagctccccgctgctgccgcaagacaagtaattttcagttttttcgcacataatcttgcaacacggaccggatgttattataataggggcaatacatcatttaccactgtaacacgttaacagcagaactataaacaagaatggagtatcgctatggaaaagaaaaatattgattgggcaaatatcggctttggttatatgcagaccgattaccgctttgtttcacagtacaaaaacggtgcatgggacgaaggcgcactgactacggatgcaaatattgtattgaatgaatgtgccggcgtgcttcagtatgcgcagacatgctttgaaggtttaaaagcttatacaaccgaagacggacatatcgtaactttccgtcccgacttaaacggtgagcgcatggaaaattccgccagaggtcttgagatgccggcatttccgaaggagcgctttgtcgaagccgttgccaaagtggtagaggccaacgccgcttatgtgcctccttacggctcaggtgccagcctttatatccgcccctatatgtttggttttgactccgttatcggagttaagccggccagtgaataccagttccgtatttttactactccggtaggcccatatttcaagggcggcgccaaaccgatcaccatccgtgtcagtgactttgaccgggctgctccacatggaacaggtcatatcaaagccgggctgaactatgccatgagccttcatgcgattgtcgatgctcacaaaaagggatttgacgagaacgtttacctggatccgcagactagaacgaaaattgaggaaacaggcggcgccaacctgatctttgtcacaaaagacaataaactggtcacaccaaaatcctccagcattctcccatccatcacacgccgctctatcctccacgttgccagtgaatatctgggtatggagactgaggagagggaagtgttcctggatgaagttaaagactttgccgagtgcggcctctgcggaacggcagccgtaatctcaccggtcggaaagattgtagatcacggtaaagagatctgcttcccaagcggaatggagcagatgggtccggccacccagaagatttacgacacgctgaccggcatccagatgggtaaaatcaaagcgcctgaaggatggatcaaggttattaaataataaatacatgacaaggcccggaacttttatcccgggccttaactgcatacctgcctccggacggcatttcggattttcaaattaatgttctttggccttcttcctcaattccctgaaaaactccttcagcatcccggaacattcctcgcctaaaatcccgatctccgtctccacctgatgattaaatcccttctcatccagcagattcataacagaaccggcacagccggcctttgggttcatcgagccaatcagaactttgggaatgcgtgcctgtacaatggccccggcgcacatgggacacggctccagagtgatatacatcgtacagccctccagcctccagtctcccatttttttacatgccttttttatcgcatttatttcagcgtgtgacagaacattcttgtctgcgattctcctgttataccctctcccgattattttcccctcaaagacaataacacatcctatcggcacttcccccagcgcatacgcttttttcgcttcacggattgccgctctcatatatttttcatcatcggtcattttcattattctgctccatctgacttttatatttctgtttacccttatacaagtatacaaatcaactcccgctttggcaagttgcacctgcgcgaatttcgtactataatattctctatatgttactgttttgccttcagcccatgaaaggactcaaacttatgattatatccggacttttgaaaaccactctgttagattatcctcagcacgttgccgctaccattttcctgggcggatgcaatttccgctgtcccttctgtcataacagtgatctgctggaggggacggacggactgttctcaaaagaggaggttctgacgttcctgaaaaaaagagccggtatcctggagggggtctgcatcacgggaggcgaaccgaccctgcaccgcgatctggaaccttttatcagggaaatccgcagtctcggtcttctggttaaactggataccaacggatacctgccggatgtattaaaggatctatgcaataaaaatctgctggattatgtggcaatggatattaagtcaggccggaccgggtacgccaaagcagccggcgtcccgggtctcgacctgtcacatatagaagagagtgttgatttcctgatgaaaaatacggttccctgtgaattccgcacaacggtcgtgagggaacttcacagggaagacgattttcgtgagattggctcatggctcgcaggagcttccgcctattttcttcaaagctataaggattctgaaaatgtcctcgtcccgggattttcatcctatagcaaggaggaacttctgcattttcgtgacgttcttgttccgttggttccctctgcagcgctcaggggtgtagactattgacgcctgcatctattcgcctatcttcacatcggtgtaccaatatccaaaacggctgtctctgggcggctgttttttcgccagcacaaagttagaaaaaccgaacatggacgccatatacttttcattgctcaggtaatgccccggaactcccagcagatatctggcttttccctccgggttattcagtcttgcaagaatgagatagcggtaattataatagccgtgcagcagaaagctgttgctgccatatacccattcttcacgcggaagcaggccgatatcctgcggtttgattgtcagcacttcacagccgtccgcataatcaaatgcaagaattttcggatatttctttctcatcatttcccaaacttcctgctcatcacatatgtcactcaagtctttaaaaggtgcggtcacgccagacggcggactcgtctcacacatgtcggcctgagtttcctttctatcatccgtctgctcttcctgagccggccccagagattcgggctttaaagtctcattccgaagcgctcccgactgcattcctctccggggtgtaccgtaccgctgtgaaactccgcctcccctatcctgtgacatcttcatctgagctgcctgcatttggggctgctgcacctggctctgattcatcgggttttgctgctgcatctgccccggctgggtctggctctggcgggtctggttttgctggatctggttttgctgggtctggctctgctgagtctggctctgctggctccggctctgctgcatctgaccctggcgaagctggttttgcctcatctgggccgactgcatctgcccccgcagcatctgctgcattgcctgcatctgctcttgcctgatctgcggctggacagcctgcccttggccggctgcatctgactctgccttatctgccccggctgcatctggttctgtgccctctgcgttgtcagcatctgaccctgacgcagctgctccggctgctgacggccggaagattcctgcagcatcatccctgacgaatgcaccgccggttcactcattccgggcgccgcattattaggctgaaattccggctgtctattggtcttcgccaggccgggcgctatgtattccacctcagatgttacggtagaatccagcccctgaattgcttcatcctcgccggcctcttcctgctgcggcagagccgtctccgcttttggtatttccatttcctgtaaaggttcttccgtcacaggatcgctgccatttacaggttcaggttcgggcatcctccagacgggcattctcctttttacagtttccactgcagactgccttattggcagtgtttcctgagctgccgattgcgcaaatatcccggttccgccttccgtcttatctgcttcctgtatgtcggccccccttataatttccgctaccggcttcaattcttccggctccgcttcaggcaaatcagcttccgatgaattgacttctgttgagttaacttctgatgagttagcttctgttgagttaacttctgatgagctaacttccgatgaactaaattctgccggattgacttccggtgccattaccccgtctctgttcgtctcatccgcgtttacttcttccttcttcaccgcttctgcatctgctgcgtccggaagcgccggatccctccatgctttttcgtccggaaccgccgcctcattctgccgtatctgcgaaacgattttctctctcagtcctgatgtaaaagccctgccctccgccgtctgcgccgtattgcgtgataccttgggaatctcggagctcagatgtacaatctttccctgttccgcatcgtataccctgctgccggtttcagcctgtttccggtctgttgcctcacagacgctctcctcctgcaataccgcttccttttcgacctgctcttctatctccctggaaataggcagaagctcctgttccttttcctccgtctgcaaagcgctctgtacttttgcagtattgtcatgtttcatcgcaactttttccgatgttacatcggccagctccacttcggccgcatgcgctaccgcatcttcccagatagtcgtgtaggatctccatgcgctttccacatcgtgaacgctcagcccataaaattcttccagactgtgccccgaattttccacatccgccgaattaaccatcgttctgaattccccggcgccgttcctggcaaacaaagtacctattttcacttcatcctgccctgagagcaggtatactcctaccggattccctccgacaaatatctttttgacatttaccgtaattctgcactggcttcctcttgtttccagttttgcaaatccgatgttctttccgcgtatccctccttcgtatgtatagatatatgaaattagtctctgatagttagacatgctatcactcctttgctatctattttatgctgttatgcattgaaactatgactcaaaaatggtattcttaacttgaaagagctataaaattgtatggagggtaattgaatgagagtttacaaagtaaaaaattatgacgaaatgagcagaaaggccgcaaatctgattgctgcccagatcatcacaaaaccgtattccgttctcggtctggctaccggttccacccccgtcggcacttacaaatatcttgttgaaaaatacaacaacggagatttggatttttctgaggttaaaacggcaaatctcgatgaatacaagggacttacaagggaaagcgagcagagctactactattttatgtacagtaacctttttcagcacgtaaatattaatatggacaatacgaacattccaaatggcatggctgatgatgccgatgcggagtgccgccgctatgaagatgtgatccgttctctgggcggcgtagacctccaggtactcggtcttggtcatgacggtcatattggttttaatgagcctgccgatatatttgaaggcccgacccactgtgtggatttgacggagatgacaattgaagcaaataaacggttctttgcatcggctgacgatgttccgcgccaggcttttacgatgggtatcggtacgattatgagaagcagaaagattatttttgcagtcagcggcaaagataaagcggcaattttaaagaaagcgctttatggccctgttacaccggaggttccggcttctatcctccagttccatccggatgtaattgttatagcagacgaagaagcgctttccgaatgctgattcgaaacgtaattttattatgagatcaaataagacgtcagattccggtttcacagccggttcctggcgtcttttaacaaattttattaccattcgcgtttagtttgaaggttgtgcccagcacagatgcggctcttctgcacatcagcatcctctgaagaaatatttcgaagtaatccatcatggagcagatgttttcatcaagctgaagatccagtttgatcacctttttctctttctgaatatcgagtgaagaagatactaccgcatagttcacacggtcatgtttatcgaatgccgccttattttggtttctgaccctgtctctgcggacatccgtcttgtcagccagaatcaatgcggctgagactgtatccacggctccgcccgatttctcgtcatgcatgccaatggcattgataattactgcgatgtcttcataatccattttcatgtcacgcagtatctgatgggccattaaagctcccgaatgcgggtgatccaaacggttcacacaatttccgatatcatgcatgtagcctgctatttttgccagttcgacggtatggccgccgtatcccaggcactccagaattttcccggccatcgaagagaccttaactgcatgttctgcggaatgatccgtataacccagcacccccagcgtgctgttgcctttgtaaatatatgcattaacctcttttgatttcttaatgtctttaaatgttacttgttccaactgcttcctccttgttcttatttccgcttttgcggtacgtcacctatcttatcaggagaagaaacagtctgatatcacggatatgggaaatttacgtcatgaatatgtaaaatcccgttttgcggagcgtcatgtatttttcattattgccatctctacagaatcggccacatgctcgcagcagtcacagcactcttccagacaattgtagattgttgtccagacaaggatttgcaccgcgtcattttcttccgtgtacagacggtggactgccctcgtataaagctgatctccttcctcttccagacggttcagagtaatgattttctctttcagggtcggagatcgccggaaattacggaaatcctccagcatttctttcattgcggcgcagcacttccggatcagcgcggcaaactccaatgcttcgggccgcagggatctgatattatacatataaagatttgtcagaacctcatccagcacgtccgtcacatcatcgataatattggtcagcgccatgatatcttccctctcgatcggaggaagaaattccttcatcagcttctccatcaggctgtgtttgcccagatcaccacgatgctccacctcatgaatatcctgaattttttcaggcaggtttacataatcatattcattcatgttctcccataacagctctgccgcctcacaggaacactttacattatcgacgagcattgtaaaatagtcatttccttttttctgtgccattgccgcactcctttcaaatccttatattaaaatacccatataaacaactttgcagtcaaaaatccgattacaccgcacccgggaaaggtcagcacccaggtcagcaccatttccttcaccacgccccagttcacagaggagacgcgtctggccgccccgacgcccatgatggccgttgtctttgtgtgcgtcgtggaaaccggaattcccgtcagagaagacaaaagcaggcatccggcgccggccagatctgcagaaaagccctggtagcgttccagcttcaccatatccattcccactgccttgatgatccggtatccgccaatcgaagttcccagtcccatcacggcggagcagagtatcatcagccaaaccggaatactgaactctccgacggccgcatttccctttgccagaaaaattcccagcatgaaaactcccataaatttctggccgtcctgggctccgtgcatgaaggccatggccgcgcccccggcaatctgtgctttattaaaaactccccgtgtctttccgcgatccatgtccctgcacagatactgtaccgtcttggccgtcagccagcccatgacaaatcccagaaccgtagacagaagcagaccatagattaccttaatccactccgacgcgttgattccatccatgcctccgtgaagcgcaatagctgctcccgacacacctgcaataagggcatggctttcactcgtgggaataccgaaccaccaggcagccgtcgcccaaaccacaatagcaaggagagcggcgcacagcgcgattagggactcgtgcggatcacctccgaaatccaccatgttgtatattgtcgaggccaccccggcattgaatattgtcataacgagaacacccaggaagttgaaaaccgctgccattatgattgcagctctgggatgaatcgcctgtgtggacacacaggttgcgatcgcgttgggggcatcggtccatccgttgaccaaaatgaccccaagtgtcagaatcacggtaacggccagcataggatttaccgtaatttgcgaaagaaaatccgctaatgaaattgtcatagttatcctcacttttacgtgtattaacaagtattgttccatgctttgccagttaattataatagttttacgccgtacgtacagtatttatggcaattctttactctttctttacaggtcccgaaagatgggatacggtttgatttcccccgggaaacggttcaccgccatcaataaaggcacgcctttcggcgtgccacagagcggttcggttttcacttatccatcaagcttaatcggtatttaccggagggctcacataatccggcagagggcaagtatatctgccgccgtttcgtctggttacctcgtcctttgcggcagcaataacatccggcctctccctggtccggaccgccgccagcgccattaccttggccgctgtaaggagtcctttatgggcgatggaactgcaggactgtgcagtcatctgccatgtgtggccgacattgcccacacagctggttgccacgccgagaatcagggtggggacagcgtatcccacatcacctacatcagtagaactggtgtcctgctgtatcttcgatgcatcaaaaggatggacttcactgtcaagcggcttttcgaggatctcctccagcctgtcggcgccatataatgccgcaatcttttcccgtatcatttctctggtatcatccgtgtaagtcgacagaaattccttagccagacggtaatccccatcactccactcaggcgcgccgacctccctcaggcattcgtccgccaccgccgccagcgccaggttggggacatattccgtaaaggccagaaccaggcggtattccatcgatgttccagtcatcattgcggctccctttgccacattaatgacccgttctaaaatttctcttacttgcgagatccgcggcgctctcacctcccagctgagcgtcgcatgatcctgtattacattggtggccgagcctcccacgtcgctgtaagcgctgtggagcctggcttccggaatgataaactctctcagataattgcagccgatattcataagttccgctccgcccagagcgcttcttcccaaatggggcgaagagcctgcatgagccgtaattccccggaaagaaaaatcggctcccataatcgcgttgctggaagacggatctacccggttaaccgtagacgggtgccaggtatatacaaaatccacattgtcaaacaggccggcccgggtcatgaactgcttcgaaccggccccctcctccgccggacatccgaagtaaataatcgttccatcctttttaaactcttccagataatttttgactgcaattgcagccgccagggaagctgctcccagaacacaatggccgcatccatggccaaagcccccggcctcccgctctttcttaacagggagcgccgcctcctgactgagtcccggcagggcatcgtattcgcccaggatccccatcaccggttttcctgttccaaagacaaaggttcctgtaaagcaggttggaatccccgccagacccgtctccacagtaaagccggcctccttcaggagtctgcccagaagcgccgatgactgcatttccttaaagggaggttctgcatattcccaaatccggtcattggcatccaggatccgctctgcctgtgcatccaccgctgcttcaataaactttaaatccgtcatctgatatacctcctgtgtttttcttaaaccttaaggcaagtataatctatattccttttattttttatgttgaaatgttaaaagaaaacgtcaaaatgttgcatcctgtctttttcttccctgatatcgcactatgccgtttgtccgcttgattttcaatattctgtggcctataattgattttataagtttaataaggagtattctatgaaaagcaagcgtgcacttgacatttccgcacttcctccaattgaaaatctaaaaatcggttctttcggctaccggtgccctgaaccgctgttcaaatatgggccggttatccataaagggtattacctgtgttatatcctggaggggaagggctgttttcaatacggcagccattattattctttatcaaagggacagggcttcttaatcgaaccggatgtcatcatctcgtgtcaggcggaaaaaatctcgccttgggaatatgcctggctggaactgcgggggcctatggtccgtcagctcctgtattccatgaagctgtcgtctgcaaaccctgtattccattgtaagcagaactcgcatttgaaatattacacccaggaaattatgacggttcaggagcagcgcctcgccgcttcaagtgacatcatacggttaaacggcctttatctgcttctgctctctgaaataatacggcagactgcttatgcagaattcagcagtcaggagcaaaagtatctcaggcaggcggttacatacatcgaggataatttcagtaaaaatattaaagtaaatgatatatcacattttgtatacattgacagaagctatctgttttccatttttaaaaaatatttatttcaaagcccgcagcaatatttaacctcctgccgcatcgacaaagctgttgaacttctccgcaccacctcgctttctgtggaagaaatctgccatgcctgcggttatcaggatgtcggcgcattctcaaagctttttaagaaaaagctcggcataacccccgccgcgctgcgaaaacaccttatctccggcatgcctccctcttaatcagatatcataattgatatgaggcgtgccggtttgtctttcctgaaacggaccaatatatgttcttcatctctccccaataaagctgtcaataacggcatatcgccattaaattcatgaaatttatagataattggatgaattttatacattggaattgaatttttacaaatgttatactttttgtatagttcaagtctttttttctgcgaaaatatagtaaatatatccataagtaaaatcggatctgcccggaaatgggggttgttgcccttcaagtcagattagagtgagcgtgagaaggaggaaatcaaatataaaaaactaaaaatcaaggtatgtgaaaggagaagggtaactatgcgtaaatgttcggggaaaattctggctgcagttctgacaggatttgcgcttgcctcagcgatgagcgccggtacgctggcagcacaggagggaaatcggcctgctatgggagatataaggcgtattcaggcttatacggatgaaaccgtctacggtaccggactggtgaaggtggaagtaacctataataacggtgtcagtctgacggggattaatgcggacagttatattctggaagaccggggaacgctgtcacccgattatggtaaggttaaaattgccaaagccgttgtggacggtcaggttgtcaccctgaccatggacaaaggcaccgcagctgccgaaaataatgctctcatctataccggcgaaagcgcgcagggatcacgcgtgaggaacgcctttggcgtttactgcaccggcgcctggtaccgggatgaaaacggcgcgattcattacggcagcggcgacgcggataaagggtacctggcaaatacgacgggaatggggtaccaggccagggcctgtctggagctgaaactgcgccatgcgtgggaggagccttccgctgccgtctgcctggccggcgaggccgacggcagatacaaggacggcgggccatgggcaaggacgattgacctgcaattcggagaaaacgggttccgttcctttgagcaggccggaatccgcgtaagcagcacagcaggaagagcgtccgacggtaccggtgatgattatgtccgcggttatttctatgttccggaacattacgatcccgcggcaggcattgtatttacgcttcagggacagggtatctcctactggaagctggcggacggatgtgataacgacggcaccggcattatgtacgactccgccaccacttcatggattgacaaaggcgccatcgtggtcaacatccatgaccgctccagcgccggtcccggaaaatattatgacatttatgattttgtagctgacgacgtcaatgtgatgaaatattttatcgatgcatacggagtcaccggaaatgttgttcttcaggggaattcgcggggaaccatggcctctgccctcattatcaaggcgctggccggacaaccctatcatccccagaatcagaaaaacggaaataatgtacaggaaacttatgggctgcctgccggcgcttacaattttactattgattcgtatatctgtcagaacggcacctttggctatggctatgacgacgccgactgggcagccgtagcagagaccggcttaaaagtatgggcttttgacggagaacaggacacggataatatcggcagcatcgcgaaatacaaagccctcatgacttctttgaaaggcgctgactgggccgctgagaacgtacgccttaccggctatccttccgagttatatgcctactggggcgagagcgatcattccactacacggcttaacgcttggtatttcagtgactccgcattttatggacctgatttccggattgatccggctacaggaaaactcacctggcatactaagctgaacgacggcgcgtcttatgaactgaagtgccgcggtaaagcctcaggaagcagcaaagaaggctaccgctataccatatacgatgatctttatcaggagtgggcgctcaaaggagcacccgttcaggagacaacggcagtacccaccgtttattcagcggcagttacagattttgacagtataacggaccttaagaaggatttctcccaggccgcccagctgccgttaaccgggtgcttcatgaagaatattgacgtaaacggcaacggaattgcggacgacgcccgcactgccagtgtgtatatcgcgccagaggcatccatacgttcctattttaccgtagttgccgtgcccgacggcgtgaatacctgggattttttaaagaaagagggctggcttgatctggcggatcgaaagggtgaagggctgtttattctggagccaggcgccggcggctggagcagtcccgctgaagagacgggttatctgaaagcggcagccgcttttctgaccggcggtaacaatattcacagccagaatgtattttccacttttggcgaattttatctggccggttacgggaaaggggcagctgccctggagtactgggcagctgcaaatcccaccttggttatcagccaggtatatttaaacggagagagcagcggcaacagtgcgctgatggccgtagcaggaaccgaatatgacggtaaaagcgccaacggcgacatgacggatgtgctggacgaaacattgaagcagacaggacttggaggcgggcgcagaatcgcgccaaaggatgtgccggttcccacctatctggccggttataccggcagtgaaagctattggcaagaggctaacgactgtctctctgccccggtaaacggcgtatactatcaggatatcagctccgacgcttatcagacagagtatgcaaataaaaagcagaaggatgccggagccgtctacggaatctccaaagtaaaggtgtcggggtcttccgccctgagagcagatgaaatttatgccttcctgtccgaatacacacgctacgataccacttttgcatattcgaatgcaattgcacagcgtctggattacacttccgcccgggttgccgcccagcgggacgcaaaggacggacagcctaagcagaccttaagcaacggcacacagatttgggccgtcgaggacgcggtcatcaggggccacggcactgttcaggtgggcgtgattgcctttagcgacaacagcggcgacggaaaatgggatcccagggaatatttgttatatatcccggagggatttgaagggaaaaaacttcctgttttagtggtctacccaggcaatacgcagaccgactcgatttttatggattccactttgtggtggcagaccgccgaagaggaaggcattgccctggctttcgtctgtgagacctataacgccagcccctccagcgtgtcacatgcggattccgatttgttttaccactctctcatcactctgctgaaggagaaaatcgacggaaaatatgcagatttagacttcagccgtatctatggaacaggccagtccgccggctcaaacgcaacacagggctttgccatcacaaacccggaattctttgccgccgtcggttccacctcagcggcccctgttccggaaaatgcggcaaataaaccgatccctacgatgatgataacaggacagatggatgtctccgacctggcaaagggattcggttcggaaagcctgcggggctgggccgaatatatgctgggagtaaacggttttggcagcgcctttgcgcccggtatggagaccgaagtcgtaacggtagactcacgccatccggccctataccggtggagcagaaatattgaagggacagacgtacccctcgtccagtgggcacagtgtctgctgcgtcctcacaactgctacccctcagacattcccatcttgtgggactttgttaagcatttcagctttactgcggattccaacggcacgattacccggtattacagtgaatcggcatttgagaaggatgacgcaatcgtcatcagcgtgacggccgcagacaactaaggcagagcggtttttatttaacaggagaactttcctgttaaacgataacctgcacgctcaccgccctcaataaaaaagactcacatactttttaaagaatgtgagtcttttaactgccggcgaccggaatcgaaccggtacgaagtttaaccctcgcaggattttaagtcctgtgcgtctgccagttccgccacgccggcattcatgattgctcatgactggcaatattcaattaccaatggatggaggtggattcgaaccaccgaagcgtgtcgcaacagatttacagtctgccccctttggccactcgggaacccatccaaaattactctgacagttaaaaataatatcataacagagggaaaaaatcaaggggaaattgtatatttttgtagtatttttacaacttccaataagtccctgcatatcctgtgcagggacttattgttcccgtgccaccagcactgccgaaccaactgccggcacttctattataaggattccgttctttacttcatagttcacggctcctgcattatacccttcttcataagtgagcattctgcggctcatatactcggaatccgtcacgccaatcagccataccggtatagaatacgtcatcgcctcatggcaggtgtttattatgacaacgcccttgctctctccgccttccttattgccgcggctgaaacgtccgtacgcaatcatcccctgttccgcagccaattgccggagtgaaccggttctgaacgcctggtttctctttctgattcccgtcatgtatcggtggaactctatcagttccaaatcttcattgccccatggatatgttctccggttatcgggatccgtccatccgcagacgccggcctcatctccgtaataaatcgtcggcgctccgggccatgtcatctgaagtacgacgccctggcggaatatgccatagctgatgccttccgaagcggcagcggcgccggcggttcccagccgtccaattctccggtttgaccgtgtcaggaacctggaatggtcgtgatttgacaattcattcattgcagtcataagcgacgaggtctgcatcctcagcatatgatagcgcatcatctcaaaaaatgctttgccattgccgtaaagactttcatttgcctcatcactgtgcttctccaatccggtcagaaaccaggataccggctccataaaagcgtcatagttcattaccgtatcccattcatcgcctttgagccactcactgggatctccgtaatgctccgcaataattacagcctcggggtttgcctccttgactgcttttctgaaatctttccaaaactgatggttgaactcactggttctgccaagatcggcagccacgtccaaacgccagccgtccgcattaaacggcggcgaaacccattttttaccaatatccataatataccggtagagttccgggattcctcataattgagcttcggcagagtcgaatgtccccaccatccgtcataactgtcgttgaacggccagttgccgtgattgttaaacttgaaaaaattccggtaaggacttttgtccgatacatatgctcccggcgggtagccgccctcatgctggtaaatcagttccgcatccagccacttgttaaaagaaccgcaatggttaaagactccgtcgatgataacacggatccctttctcgtgagccgcctcaacaaatctcgcaaacagcagatcactggcctgcaggttttcttcatccgccgttctggccgtatacttgcctgcgttgtcattatccatggcatcaggctccacaagtaaatcgagatcgtgccggataaccccgaaatggggatcgacgtgatcataatcctgacaatcgtatttatggttggaaggagagacaaatatcgggttcaggtaaatagcctccaccttcaggctcttcagatagctgagtttatcccagattcccctgatatcgcctccatagaaacgtctcacatccatcttggacggaagctcattccagtccctcacccgctccacgggtttcccaatatagatgtattcattcgtttccacatcatttgtcgggtcaccgttacaaaaacgatctacataaatctgatacataactgcgcccttgcaccaatcaggtacaaaaaatccgggagtcatatgaaacgctgtctcccgcgacggctgatctgccgcccccagacggccgtagaaacagatatcctcctcccggtccgcccggaagcagtaattcaggacctcttctccaagtatatatttacagcggtaataatcaaacaggctgtcgctgtggctgtattccatgtcacgctctttcattctatcctgtttgtcatattctattaaataaacagcgtctgcaccgtcacgctccgtccggaaataaaaaatcacttcctgcccggcatccgcctcgcagggatgtcggtaatcttccgtctcgtcgctaaaaagcgcttctctgttgatcctctccatactaatccctctttctgctatcacatctattttaaatgattcccgtcaattacacaatcagtttctgtgcatcgcgaagcgtgttattatttacagcatgccgctgtttggcaaggcgtgaacagtaacaaaatgcgggcaacagttcatgctgtctgaactcttataaatgcggtcctgcgaacaaccgctgttttcgacaaaaaggtaaaaaaaccatttgtttcaaggcagtaaaaaggccagcggggtagctggcctttttaggagaaggtatttcgtttttatggggtgtagcaaaaactatataatgtattgggggggggttacgagtattataatagcacaggtgccaaaataagtctgcacaaacatcaaataattaacccgttttttttgtgcatattgggcacctctttttccaccttttggcagagtgcctatcatatcgcacaaaagccgctgcaatcaatggtttttgattgtagcggccctgaaatcaggcaaaaagtgcttcaaattccgcctgtcctatcttctctttttccagaagaagctcacagcatttatgcagtacatcttcatgttcaagaatcatttttttggctttttcgtggcagtcgtcaataatcttcttcacttcactgtctatcgtactggccactgtctcaccatagctgcgtgcatgcgccagatcacggccgatgaatacttcattgctgtccccgccgtagttaatcattccgactttgtcggacatgccatactccgtcaccatggctcttgcaatggacgtagcctgcttgatgtcctgagacgcgccggtagtgatgtcatcaaatataatctcctccgcgatacgtcctcccagggataccatgatgttctggagcatcttccccttcgtcatatgcatgtcatcggtctccggcagcggcatcgtatagcccgcagcccctattccggtaggaataatggaaaccgtatgaaccggccccacatcgggaagcacatggaaaagtattgcatggcccgcttcatgataagcggtaatctttttatccttttccgaaataaccttgctcttcttctcagcgccaatcccgaccttgataaatgccttctcaatgtctgcctgcatcaggaacttccttccgtctttggcggcattaatggcggcttcgttcatcaggttctccagatcggcaccggtgaatccggatgtcgtctgggctatacggtgcagatccacatcctcgcccagcggtttatccttcgtgtggacaccgagtatctcctcgcgtcccttcacatctggcctgccgaccgccaccttcctgtcaaaccggcccggacgcagaatcgccggatccaggatatccacacggttggtagctgccatgacaatgattccctcattaactccaaagccgtccatctctacaagcagctgattcagcgtctgctccctctcatcatggcctccgcccataccggttcccctctggcgggccacggcatcaatctcatcgataaatacgatacagggggcattctttttggcatcctcgaacaaatcacggacacgtgatgcgcccacgccgacaaacatctccacgaaatccgaaccggatatcgaaaagaacggaactccggcttctccggccactgccttggcaagaagcgtctttcctgttccgggagggcccaccaggataacgccctttgggatccttgcgccgactcccgtgtatttctgcgggtttttaaggaaatccacgatttcctccaattcttctttttcctcctgaagcccggcaacctttgtgaaattgatattgctggtccggctcatctttgcacggctcttgccaaaattcatcatcttcgcattggcgccgcctccggaacgtgaattcataaacacaaagaaaaagatgagcacaccggccgaaagcgcaatcggaaggattacggtcatgaaataattgtcctgctggacttctgcgaccttgtatgcaatccctgcgtctctcaaagctgtctcgatttccttcgtgtcgagaacatagaaatcctgcttatcgccggatgtcatgtaaagctccacttctcctgtcggtgtttcccggttcggcttgatcactgcactgctgatactcccgttttccacattcatcataaattcgggataactgatcttacccggcataaacatgctctggtttcttgtactgaataacattatgaggagcattacaaggatcagaagtcccatgccccctccaaatgactgccgctgtttcaactggcttcctccttatacttccactactcctatatatggtaaattccggtacttttgatcatagtcaagtccatacccgactacgaactcatccgggatggtaaagcaggtatatctgacctgaacctgtttcttcacacggcgctccggtttgtctaacagagtgcaaagctcgatgctctttggatttctctgcttcagaacctcgatcaggtaggaaagcgtccttccggaatcaatgatgtcctctacgataataacttcctttccctcaagcggttcatccaaatccttgacaatctttacgataccgctggatttcgtccccgcaccataactggaaacggacataaaatcaagggaaaccgacaaatccagacgtttcgccagctcgcaggtgaaaaatacgccgccctttaagatacaaattaaatgaacgtgtcttcccgcataatccctgttgatttgctccgcaacttcactgattcttttatttacctcttcttctgttaacaataccctgatcttatcggccactgtctgttcctccgtctgtttgtacttgtaatatatttttcgtctgttccgttaccttgtaatattcgctgatacggtatcccacaatccataatacatggctcccctccgccagaagcagaaccgcatcccggctttccctgggaatcttttcatcaatcataaaggattttaccgacttcctgcctcccgatgccagcgtaatatagtcgcctgtttggcggttcctgacagataacgtatcttttattttatcataatcaaaccatttcgtatactggtttttgggaatttcctgctgattttgccggggaaaaacctgaaaatcaagccgggccgccgccctttccccgctcctttccggaccggcaattgaatccggcatggcatacgcctcttttccacggctgaatatgagcctgccgtattcaattccggccgtcatgccatagggaagattcacttctttccctgtccctttccctaaaagttccaggacactgtctatatgcctggctgtaatatcttttagaggacagcccagttccctcaggataatgcgcacagcatacctcctgataatcctatcctctttcagcagctccgctgccataaagactgcggtttcgttgctgttttctgttccggcattcccggcagccgccgcaacggcatgctggcgcacccactctccggccgtcttttccagataccggtccgcctcgcagatatgttcgccggccctcaaaatattttggactgcctgcccgttaatgcgggatgtgattaccggcagcagttcattccggatcaggtttctcgtataatctgtcccgctgttggtggaatcctccacatacggatatccatgcgcccggagccagtccagtatctcccggcgctgcgcccacagaatcgggcggataatcctgcccctgaccggcggtatcccggacaggcctttcaagcctgacccccggaaaaggttgtgaaggattgtctccgcactgtcgtttccatgatgggcagtagcgatatggacatggttccggccgtctttctcccacaaaagcgcctctgcctctaaaatccggtatctggcccggcgtcccgcttcctccactgatatccctgcttcccgggcttcttcagccgcgttgattcttactgttttaaacgggatatcaagctctttgcacagttcttccgaaaaggcggcatccctgtcagcctccgatcctctgagcccgtggtggacatggactgcccgaagctcaattccaagctcttgcctgagacaccgcaaaatacggagcagacagacggaatccgctcctccggacaggcctgcgatcactccgtctccctgttcagccatatgatatttttgaataaaattaagagtctctttcttcataatataattcccggtatctgcccgttaccattcacggtctgtattccgcgaggtattttcctacgcatttgctgcgctgaccgtgcgaaaatgtaacggcagcaagcatcccttcgcctgtttgcctacagtatacaggaatcccgtccgtttcacaagggctatctctcaaaaactcccccacaaggaccgtcatatcatctcccggctgctcttcaaacgaaccggcaaactcaaggatccgctccgccatctcctgcggattgcctgtcccggttccttccagaaaatctttcagcgtttcttctttgttttcacccggcaatgcctccagcactccgtcactgaccataataattctgtcattatcccacattttccgcgacaggagtaccggttccacggtctttaccacacccatcggcacatccccgcttccaggacctccactccgtcatgtcccacaatgaacgtcggcacggctcccagcttcattgcctccagaacccccgtatacaaatccacgcagcacaaatccagcgttgccggattctgttccgtgcctgccagtaaaagcaccgtattgaccagtttgagcgccgaacgggcggaaaatccggtctccagaagctgctgtgtcagctccaccaccttgctgctgtcctcgtttgccagagggccgctgcccataccgtccgacaggctcataatcacctggcgcggcagcccttcatggatagtaaaattatcccctgatatcagctcgccccctttgccgctttggccaccccatggagcatcctgtattttccctcctcgacaaagcggaatgtggccgcattcctggtaataatgctcttactgtcctttgccggactccatttccgtcccgacatggcccgtcccaccagatccgctgcatcccgggccgtcatgcatctgccgttggtgctgcggacggtgagaaacgcttccttttgctcattctcgtattcaagcatcagcatattctccaccttcatgtggtggcggcggaagatgtacttgatctgttcctcccagtctccggtgatatccgtcgcattttccatctgaccggaaaactcctccaggatggaagcaagttcacggaactgcacgatgacggtgtcccggctctccagaaatctgtttttccacgacagattcatcgtggcccgtcccaggttccggttcagatgcaggacataatcatcctttctccggcacgcctcattgaacagccggggcatgtcctccatgtcgattttccctttctgttcaaatgcgcggagaagatagtaaagataatagctgtcctctcttttgctgcctgagtacagattgcatctcacacagtctccgcagaccgctgccgccgcagtctgcatggctgccagaccgtcatcctttgtcagctgccgtcctcccccgatttcgtctgcaaacgcctgagccaggccgctcagcgacattgccatatccttcaggcgtctggccgtatagacattgacatccgccatgtctctatgtaaactcttctttttaagcacaaaaatccctcctaacctgcgtgaaaccattatatacaggccggagggaaatatttgtcaaattaattggtggaataccggaaatcgtacgacagataacctcaggtttcgcccgaatccgcttctgttattcctgtttttgcatctttaccggcctctgctccgtatcagttcatgccgtctgaactgctacgctacttcttttccgccggcttaagcagaatctcatctttattgacaagacccaatttttctttggctactttctcaatatattgtttcgtctggacatagacacggtactgttccagctccgccgctctctcctcttccgcctggacctgggccttcagattttcctccctgatttgataattcagatctttctttttcaggtcaagcccttttaagtgaaccgctgtcgccaggctcagaaccaccagagtgatgccgatcagtgccatgcggttattcagattttctttcttttttcttctcattcttccgctttcccgcatctctctcctcttccgcctttctgctcctgcgtaattcctgttcctctttctcttttaaaagaatctgtctcttcgcttccttctcctgccaaagccgctgcttttcttcccgcttttctttctgtttctcttccctgtgtctctgcttttcttcgcgcagtcgaagtttttgctctttcttttccttttgtttctgttctctcaggaggcgctgcttctcttcctcttccagctgcttctgcctgatcttttgacgttttatttttcttattgtaagatatttctccacttttttcaagagcctaagcaaaatacggctgacggtcagattatagacaagcattcccataagaacgccgaatatggcataccatcggagtatcccgtcattctgcccaaacagcaggagaaacgtggtaatgctggagcctgcccagtaaacggcatcttcaatgcctgtccagaaattgccatggggaatcagggttctgaacagtctcaggccgtcgtaaaccatcatcaggcagattcccaccgtcaggctcgcagccaacagctgtaattcatagcgaattgtcatgctcatcccatttttgcccgccttttcttattatttgaacagccggttaaacagggattctcctgatttgcggtaattctcattggaggaataggcaaagctgtcgaacgtcccctctatgtcaacctcccctttttccagcgtcagccggctcacatgcaggcttttgcctttcactgtcaggagacccatatccgtatccagtataatctggttttcgtcgaatgacaccacgtcctggattccggtcacactgcccgtccctctgcccgttacctccagcttatgaggccgccggtttaacttttcttccatgcaaaaaacctcctgatatatctaactattgttaaatatattaggaggttatcctctttatgttaaaactcacaaataacgataaagatctttcgcttcgtccttcttgaccgtctctgccacgtccagcacttctactttcacagacttcataccaaactggatttcgataatgtcgcccgtctttacattcagggacgccttcgccggtttgtcattaaccagaaccctgccggcatcacaagcctcattggctacggttcttctcttaatcaggcgcgaaacctttaaaaatttatctaatctcatagaattatgcgtttaccatatcctttaatgcttttccagctttgaatttaggtgttttggaagctgcgatcggcattgtctcgccagtcttaggatttcttccttctcttgctgctctctctgctacttcaaatgtaccaaaaccaactaactggattttctcacctttaactaattcatcagaaactacatcagtgaaagctttgattgccttctctgcgtcctttttggaaagttctgctttttctgccacagcagcgattaattcggtcttattcatttgatatattcctcctgtcatcttctcatatgagctcatattactcaagttttcttgtaatgctttactttacatttatatacatttatccttgttttgtcaaggttttttgctcttttttactcttttcctccgtttttattcggttccataaatcaagtccttcttctgatgaattaactttctcatcccgaatacgttcggatgccttctgaccatctttgcgctaactccgtccacaacatcgtcaattgtaaaaagtcctttttcctctgctatctggctgtggctcatcacctggaacaggagatccccagttcctcgcagagattttcggggtcctgattgcggattgcgtcgattacctcgcccgcctcttcctccagacagggtatcagactctcatgagtctgacggcggtcccagggacagccattttccgagcgcagcgtgcgcatgatttcacgcaaatcttcaaaggtgtattttttaccggattcatggattttatccatgtttttgcttttatctgtattattcgtacctgtttcgtttatctgatccattttgaaacctcccgtcgcttctgccgctgcccggcagttcccgccggcggcgaatagtaatgcgtgatgactataacagctgatggcaaaagtatagcacaggtaaaacagtacggcaactgcaggatgcattcagataggggatttagttaagcaggtgaggacgccgccgggatggccggcagacggggtggtgatgtggtgttatgagtctttcgtcctgagggagagttgtcgtgaattgggacggaggagaagatataatctgcggagcacgtggccgctcagtgattccatatgtgttggatatgggctgatgtagtggcagcgacaaaggttccttccccctttgagactggagacaatcagcggccgtaacggaccggggccggtgtgcggaaaccttcgcctgagtcttccgtccccggagaaaacctgaaccggggaaataggcggaatcaattgcggaggggacatgggagtccgccggtgcttagcgaggtcttttcgagcttagcattccgatgcgcactccaaagagtgcaaacggtccccgcagcaattcattccggccggattccccttgcaacaacctgcaatccggggacggaagactcagtctccccctcaccacaccggccccggatcgttacgggcgcgtcctccattctcaataactactcccactcagtatggaaatgcccttccctgtcgcagcgcatataagtatgggctccaaagtaatcgcgaagcgcctgtataaaattaacaggcatctgatcggacctgtaataatcataatactggagcgaggcctggatgcaggggagcggcatgcccgacaaaacggccgccgccgccattttccgaagggagccttcaagcgtgccgatatcagagaaagctgccgataaaatcagcggtttccctgataattcttccgcctgctcgatcctgccaagcagggcgcttctgatgatgcatccgtctttccagacagcagccagaccggctagatcaatgttccagttttcctcttcggccgctttggagatcagctcaaatccctggctgtatgccagaatcatggacagcagaagcgctttttccatctcctccgtccggagcccgggcgcttcgtttgagctgtatttcagatgtgcggcaccgtatgttctctcctctttttttgtcgaaaatatccgtgccatctgggcttcataaatcgaaggaatatagacgcccctctcaactgattccgccacggtccattttccggttcccttctgttctgccacatccagtattttatcaatcagacagcctccgtcctcctcttttttcccgagaacctttgcgctgatttcaatcaggtaggaattcagaggcccttcattccactgttcaaaaacggagcggatctccccggcccccatctttttcacgaaacgcatatactgatatgtctccgctatcagctctaaaaccgcatattcaattccgttatgcaccatcttgacgtaatggcccgctccgccttccgctatatagccgcagcaggcctttccctgatgacgggcagcaattgcctccagtatggctctcacacactcccaggcctgagggcttccgccggccataatgctcggcccataaagcgctcctttttcaccgcccgatataccgatccccatatacaggataccgtgctttgcgcattcgctgcaccgtacggcagtatctttataaaaggagtttcccccgtccataataatatctcccctgtccagcagcggaagcagggacgcaatcaccatatccaccggcttaccggccgtaatcataagaaaaacttttctcggcctttccaggctcgaaatgaattctttgatgctgccgaaaatccggtaattgttcttcccgctctcaaaccgctttctttcctggtcagagacagaataaagtgcggtgcaaaaaccgtgattaatcatatttttagccagtgaggcgcccatcactcccagacctatcacgcctatattgcatttctgctcattcgtcattttttcacctcgcattagccatttatccgtatgccgaaaaggcactgcccactccggaaatttccggctgttcagtaccttttcaattacagcttctcccgaatctgctcaattaaagtttcaaactccgcatcggagagcagaacctgcggctggggctgcatctggaacaccccgccaaaatccggcccgcccttctgtttgggcacaatatgccagtgtacgtgtttgcaggtatccccatacaggccaagattaatcttttccggatgcactgtcccggccacggcccggcagacacgcttcacgtcctgcatgaagccctgcagttcttcgtcgctcagctcgtacagctcctccgcatgatttccggccgccacaacgcaccgtccccggtatgcctggttccgaaacagataaactctcgatgacggcagctcacagatcggagccatcagcagcgcaaggttttcattttcttcacagtacatacatcccatggaaacctcctattttgccagttctaccgcttcttttgtaagttttgttatttcctcaaagttcccttccctgatcagcgcatcagaaaccatccagcttccgccgcaggcataaatcacgtcattattcagaaattcctttaaattccctgtgtttatccctccggtaggcataaacctgatgcccggaaacggagcggccagagcttttatcgtgtccaggcctccgtactgtttggccgggaaaaacttgacaatattgaggccgtggccaagcgcttccataatttcggtcggcgtacagcagccgggtagtaccggaatattctttcttagagcatattccaccacatccttattaaaacccgggcttacaataaatgcggctcctgcggctacagcccgctctgcctggtcaatattgacaacggttcctgctccgcataacatctgcggataattttcccggatcacccggattgactcctccgcggcatcggtgcggaatgtaatctccgccaccggaagtcctccgtctatcagagccttggccagaggcagggcatcttcgacacggtcgattttcacaaccggtacaatccgtttttcctttattaaatccataacactactcataatctgaatcctttcttcctgccggacaattgttactgttcgccaaaccgcatatttcagcgggactgtgaataataacctctgattattttacaaggtaaccgccgtcaaccggaatcactgctccgtccagatagttggaggcatcggaggccagaaacacaaccgggcctttcatatcttcaggcgttccccacgcattggccgggattcggtccgtgatttctttaaatctcgggttatccgggttggtgagagctacgttcatatccgtatccatatatcccggtgcaaggcagttgcaattaattccccttgacgaccactcattacagagcgcttttgtcaactgggccacgcctccctttgacgctgcataagccggtacggtatatccgccgaaaaatgaaagcattgatgcaatattgataattttacctctgctgttctgctttatgaactgctgtcctgccagctggctcatggaaaacacggcattcaggttgatattgattacaaattcccagtcttcatatgggaactcttctgaaggatggcgcttctgtaccccggctccgttcactataatatccaggtgatcgccaagagccctgacacattcgtcaaatgccttttttctgtcatccacatttgcaaggtttcctattacgccatggcagctgtatcctttttccacatactctgcggcaacctccatcacctttggattcagatcaatgattgccacctccgcgccggcctccatcaggccttccgccattccgcggctgagtccctgggctgcacctgttacgattgctttcctgcctgttaaatctgtaaaattctttaccatatctgttcctcccgaatctcctgttctctcctgtgttctacttcgccacattaaatctgcactcgccgccctccagcacacataccgcattctctgccgccatcaggctcatcctggaagatgcctccctggttcccgcccctgcatgcggggttaaaatgcagttttcgcagcccatcagcggactgtcatagggcggttcatccactgtggcgtccaaagccgctccccggatttcgccggattccagcgccgcataaagggcctcctcgtctataactccgcctctcgccgtattgacaagaattgcatcttttttcattattttaaactgctcagtggaaatcatattgtgagtttcctcggtaaggggggaatggactgtgataaaatcggattctctaagcagtgtctcaaaatccacatattccgctcccgtctccttcttaaacgattcatcctcgaaaacatcgtacgccaggatcttcatgttaaaaccacggcaccgtctgccgactccctgtccgatgcggccggctccgattatgcccaatgtcttttcaaacatttccaggccctggggccttttctggctgcgggctttgattgaaccgtccatgattgtcacgttccttgccacatccagcataagggctaccgccaaatcagccaccgaatcgccattcgctcccggtgtaatcgtaacctggatccccttctgtcttgcggctgccagatccaccttgtcatacccgacgccgtagcgggaaatcacctttaatttctccgcgcggtttatggtttcggcatcaatatcctccaggccggcaatcagtgcatcggcatccttaattgcgtccctgagctgttcctctaccggtccgtctgcctcgttaagcttaacccattcacatccggcttttctcaggcagtcgtaagctttatcgtctgctttgccaaatgagcgcgctgtaataaccactttatattcagccatgatattctccttactctgctttaactgtacgaaatgccggagtattgaccgcaaggccgtccctcgcaggatccaacaccgccaaatcgtatcttctctgttcatgtgagaaaccggccagaacccaaaggtaggtattttgtgttcccgggctggcaacggtcggatgatatccgcatggcgcctgcacgcaggttcccgtatgtacgggatgggccatcacttcctccacatctgcgctctttaaataggatatatggaatccgaagtgcggtttcggcatatcaaagtagcagtatacctcttccagatccgcttcatgctgatggggaggccagcttgtccatgtcccttcaccgccccatgtgaagccgcagagcaggcgggaagctttgtcctgcggggccagcgtgaacatgacttctcttctccccgtcccctcgccgtgaatctgatggatatctcctatcggaagcgacggatcgaatttccggacaaatatttctccatatccttcgcagacggcagccgccacatagaaaaagcagtcttcttgtgccgtaattattacatccgtctcccccggaatgtaaaagctgtcatatttttcaaggcgtacgccttccagcgcactgtttccgctcaaaaccgcagcaccttcacatagaacaggatgcatttccagccgtcctgatttcagggtatgagaatctcccttattcaggttaagccggtaaatccacgcctctttacaactgcttttatccggtgtgacaaccgcatgaaatcccggttcttccggtgactgcaccgcccagttttccatatcgtgacatatgtttgacatttcctgatacctccttttgaactgttactctaaaactatattaaccagtaaaaagcgctgtgatctgcgggaacagtacgactaagaaaaacacggcaacatagccgataaagaacggcatctggccttttgcaatcgctcccattttcaatttcgatacggatgatgccgagaatatatttacagcaaccggcggcgtcattgtaccaatgacgttggaaatcgaaacaatcatgccaaagtggataacgtcaatcccgaagctctgggcgatgggccacataacgggaaccattaaaaccgcggtggcaatcccttccaggaaggtgccgaatattaagagaataaatgccgtaattaagcagaatgtagccgcgcttaagttcagaccgtttacaaacgccacaagctgagccgatattccggcaaaggcaaacagccacgcaaatgctgtggaggttgcaatgataaacagtaccattgccgaagacttggcagactccagaaaaatctgatacaggtctctcagcttaacctctttatagataaacattccggcaatcagcgcccagattactgccgctgcagccgactctgtcggtgtcagaattcccgaatagattccgcccagaatgataattggcaaaatcaatgccggaatcgcattaaagaagctttttcccagctctgccgccgtcagctttttagaagttttgggccacttttctttgtgggcataaaaaatgatggttgccatcagaaccgctacaatcatgaatccgattcccatgccggcgctgaacatttttcccacggacgcgccggtgatggtacagtagaccaccatgataatagacggcggaattatcggaccaagtcctcctgccacaaccagaagcccggccgttctttctttcgaatatcccagacgcaccatatccggatacagcatgactccaatcgccaccaccgttgccggagcggagcctgataatgcggcaaaaaaggcacaggccagcaccattgccagggacattcctccgcggaagcctccgacgatgcaattggcaaactctacaagacgcctggaaattccgccctttgtcatgatatttccggccaggacaaagaatgcgatagccattatggaggtggaatcaagtccgccgaaaattctctgtgtaacgacgcttaacgtaagtgtaatatccggagaaaagatgatggccgacatggtggccattgcaagggacaccgcaatcggtacgcctagtatcagcagaacaataaacgatccgaaaagtaaaaatcctgtcatgatgattggcctcccttctgattgcttcttactttctcttcttcctcttttaccattttttccgcggtttccacggaaagatccacatattcatacttttccgtattgccttttacaaaggccgagaccatcgcggctgcaccaatcagctgaacaatggctataattccaaaagccagaagcagtgcaaagtatggaaccaccatcggtactcccaaccccggcgaagtctgccctgatttaagctgaatctgacacagcgcaatggactggtagaacataaccgccgcaaagacaatcaatattgctttaataagaatcaaaatgaacagccttgctcttccctttagcttatcctgaagtgccgtaaccgcaatctgagttccgtctctgagtcccatctcggttcccagaagaaccatataaatcatgcagtattttgataattcttcaaaaccggtaaccggtattttggtaatattcctgttgcagacctgaagaaaagccgataatgtcatcacaacgaatgtcaggacaattatcacatcctccgctttctgcaaatagttaatttttttcactgtcatcacctctgacttttaaggccggccgattcatgcatccgccggcctattgttcacacatcctgcctgtaacaattgttatactttactttacagaagctatcgcctcgtcaacggccgcctgccattccggatcaaatgtgaagccttctttttccgcctgtgctttataagccttctgaagttcttcaacatcgatatcatagatggtaacgcctgcttcaattaatttcttctcagccgcttcattttcttccacaagatactgtctctccgcatcaatacctttctgtaccgcatccaggaacggctggcgtaaatcttccggaatctgctgccatgccttgtcggacatacagagtacaatatagacaaatgcgtgctgggtctttgtaatgttctttgtcacttcataataaccagagttccagcagttgcagagtgcattctccgctgcgtcgatggttccctgctgaagagccgtaaacacgtcgttatagttcatagcaatcggcatggctccaaaagccttgaatgccgcctgatgatacttgttctccattgtacggattgtgattcctttgaaatcatcaatgctctggattggttttgtggagaatgtgtccctgaaaccggattccataaaaccgattacatggaggcccagcttctcggcatctctcttgatgagatctcccagctttccgtccacggccgcatgagcctgatctatattcgtccagaggtatgcctgatccaggatgttcatattcgggataaagttagtcagaacggagtttgcagccgttgcgatatccaggttgttggacattgccagctcgaccgtatctctttcgccgccaagggaacctccggcattaaccgttattttgattcttccgtttgttgccttctcaacctcttccgcgattttctttgcgccttttccataaggggaggtctccgggtcaactaatgcaagctgaaggtttattacctctcctgcttcaccggaagcggaatctcctgccggggctgccgcgtcgcctgccggggctgccgtatctcctgccggggcctctttcttagcgcagcctgtcattcccatcaccatggatgctgccaatgttaatgctacaatttttttcaacttcatatcttctctctcctttttatattttttccgcctgcaggcagaatttgtttatttgatgaatgttcggtaacattccaaataattctgatatctttttctgtatacctccacatgggacggctcgggcctgacgactgataccggttccacacagaagtcctccacactggctatctcaccggccagttccatagcgagaaccacgcctcccatcagggaactctgggactgtttgtccacctccatgtctttttcaaaaatatcggcgcacatctgcgtccagcagggtgaattcaggattcctccggacagcttaatgtgttccggaatgccgttgaccgcagtcagagtctcatagcactgataaagattaaataaaattccctcctggactgctttatataaatcctgaacactgcacgacgcattcaggttttcaaatattcccctcctgtcgtcattccatcccgggcagcgctccccgaacacaaacggcagaaaaatgggccgcccgctgtcttctttaaatcctgtctccagattggaatacgtttccgcctttgcaaaggtctctttgaaccagtctatacagttgcaggctccggatgtggctgctcccgacagccatgacttcggcgataaataacaccaggtcgaaggttcttccggaattatcggcgcctccgtggtcaggcggattgcaccgctggttcccaccgaaaaggtcataaccccttttttcagcgcccctacgcctatctggtttaatcctccgtccgaattagacggtatgaccggagttccctccttaagtcccagaacggaagccggttcctttgccagaggatatatcctgtcatatgggatgatttcaggcagtgacgactctgaaatcccaagctcccgcagtagttccggttcatactttttattataaatgttcatcagtccggttcccgaggccacacattccgtcactaatttttttcctgtcattctgtatgtattgtaaacattctgccccgccgccatatagccgcttaagtcaaatcccatttccttaaacatgcggagtttaaaaaaaggataaatcgcatttaccatacagcccgtcttgtagtaatacctgtgaacgtagtccgtatcttccctgactttcctgcacagatcggaagcgcctgtatagcaccatggcagaaccggtgttacgggattcatatccttatccgtcagacacagggagtgccatgtgcctcccaaagatatcatgtcgatatccgaacggccgtccagcagctccttcgcaactgtaagcgtctcgtcaaaaaccgtctgcgcattgtgaaccgtcatgttgtcaaacattcgggaatatggccttgtcttaacagaagacaattttttgtcagtatcataaaccattgctttggctgaagatgtcgatgattccaataccagtattttcatatcaccgtctatccttccgtctgtattttttgtcgtacaatattttttatttcaaaaataaaattttttatataaaaaatattatcttattttatgataaaaaaatagagttaaaactcctaaaaataataaatatttttgtatacttttcacagtttctccggttactatccacatcatgggatcaaaaaacagaggctgacttttaatatcagcctctgtattatagagtgtgttttgtttcaatccacgggtaccgattacgctccgtccggtttatattactttatccgctcacatttcataataaccgtaatcgacttgattgcattatgcatatgtattctgatgcattctctcagccgctcctcgtccccgtcgacgattgcgttaaatatggctttatgctcctccagacccgctaaatctttttccttggactggcggcggaaaatataattggaatagatgaaaggattgattcttttgtacattcccaccagcttctggtttccggagcatttcagataaattttatggaactcataatcatggttgtaatcctggagaaaaagttcgacgtcattggtatccagaaactttctcatgatttcctcatgctcctcaatgttctgctccaattcccgccgcagtgtcttattgactttgacggcttcaattatctgcttcgtgtaataaagatccatcattaaacgcaaatcaaatatttcttcagcatctgaaagagtcattggtttaataaccattccctgccgcgggtagttctcgacaacttcctctgaaatcatgcggttcagggccagcttcacaggcgtttccgatgtgccgtacttttccgccagatccttagccattaatttttcacccgggatcagttcaccgacgataatatccctgcggatattccggcagatgatgtcaaccagggtctctttcttcccttcctccggttcgcgaatatccatgaggtcttcatcaagatctttttttaagtctttttttcttcccattttcatccttcccctatctgtctgctgttataagtttatcccatctgctgctgaaaatcaatatttaattaagcaggtgaggacgccgccggtacggccagcggacggggtggtggggtgtgtatatgagtctttcctcctgggggaggattgttgtggtttggggctgcgggcgaagataaagtctgcggagcacactcccgctctgtgaaatgcatcgcgctgctaagctcgtaagggacctcgctaatcagcgatggatttcaacggcatccgcagactttatcttcccctccgcccaaggtcaggttttcgacaggacgaaagactccgccgggtgtatcggccccgtccgctggcctgcggccgctgaatgtctcacgcgttaagtgcgggggcggaccttgtcgcggtcaccaagagattccgtgtgcgggaaatacgatatgcctacaatgcgcctttataaaagaattgcactggatttgatatcagcctgccgggaacacgtagtggccgcgacagggtcctccccatttaaggttagagacaatcagcgcccggaacggaccaggtccggtgtgcgaaaaccttcgcctgagtcttccgtccccggcgataacctgaatcggggaagtaggcggaatcaattgcggaggggacatgggagtccgccggtgcttggcgaggtccctcacgagcttagcactgctgcgcactccaaagagtgcaaacggtccccgcagcaattcattccggccggattccccctccgcgaccaacctcccacggggacggaagactcagacacccccctcaccacaccggacctggtccgttccggacgcgtcctccaaacctccgttaaatcacccttccatctgcctgcccaaaaatccggcagccgtagaagccagtttcacttccatatctccaaatttcgttctcggttcccttccgagaatggcaacggcgccaatcgcatcgccctcacagataatcggaacgattacctgggccgtagtcccctccggttcttccgatacaagagtaataaagttcttgtcttcttttactgccgtaatagtcatacgctctgtaatcgcattttcgagctgtctgctgaccggcttctgaagataatcctttttaggaccgcctgccacggcaatgacctgatcgcggtccgtgatacaaaccataagcccggtggactgggccatggcctccgcgtactgaacggcaaatgcagccagttcgaccatcggcgaatatttcttaaggataatttctccttctctgtccgtaaatatttcaagcggagtaccttccctgagtctgagagtacggcggatttctttcggaattaccactcttcccaaatcatcaattcttctgactatacctgtagctttcatacaaaaattcctccatcttacattttccacatttatctgtatcgttttgcataaatgtagtatctgtaaaacagaggaatttataccagcaaatcaaattataattaattttctgatgcgtttttttatgattttttacttatacgttctgttaacgcctggccgcaaacttcggattattcttccgatccaggataaccagaacaactgccagtactaaaagaccggtcagtgttccaatccagccattctgcgtaatgcctgctgccagatatccgattacacagcatccggccacacaaagtacatacggaatctgcgtggacacatggttaatgtgatcgcactgcgctcctgccgatgccaggattgtcgtatcggaaatcggagaaacatgatcgccgcagacggctcctgccagaattgccgacgtggaaattgtcagcgcattcatgttttcagcgccgactactgcaaaggcaatcggaatcaggattccaaacgtaccccaggatgtaccggtggaaaatgccagaccacaggctaccaggaacatgatggccggcataagcgcgcctaccagagcgcttccgccaacgaccgaaccgacataacctccgatattcaggtaatccgcgctgcagataccggacagcgtccacgcaaggcacaggatcatgatggccggaatcattgcttttataccaatcgtaaaactttcgcagaattcattaaaacggattacttttcttacaagatagaatatgaagataaataccagcgtgaaaaaggaaccaagtaccaggctcagcgcggagtcacagttggcaaaagcctccacaatccccactccctccattattcctcccgtgtacagcatgccgctgatacagaaaactatcagaataataatcggggcaaccagatcgataacctttccgttccctgcaatggtgactgcttccgcgtcaatcgtcttttcctttccctctctctccacacgctcattatatttcttcattgccgcaaaatcaaatccaccgaggatgataaagagcatgaatataatagtaaggattgcatagagattaaacggaatcgtccgcagaaacaggctgaatccatcaacaccgctgtcttccggaagggatgagcctacggccgcagcccagctggatatcggagcgataatgcagattggggctgccgtggcatcgataatatatgccagctttgccctggtaatcttatgcttgtccgtaaccgggcgcataactgtacccacagtcagacagttgaaataatcatcgacaaagataagggagcctaaaaacatagtcgccaaaagcgctccccgcctgctcttaatcgaacgtgccgcccattcgccgtatgccctggatgcgcctgattttgtaatcagagccactactatgccgaggaatgacaggaacagaaggatattgacgttgccgccaatcttatctcccataatggaaattacggtttccaccgcatggaccggattcagcccggtaaaaaggaatgcgcctgatagaataccaatcagaagtgaaagatacacctctttcgtaatcaatgccagtgcgattgctacgattggcggtatcagcgcaaatattgtaccgctcataattataacccccctggttttatttccgcatttaatgcgaagtatttttctatataataaaacgccccggcggctttgtccagcaccccggggcaatttctttcatatttatgcaatttttatgtgttttttaacgtttaaaccccctggccctgttcatgcgcctcttcatcagccatctccagggctgttgcttcatatttagcaagaataatactctgaatcatatcgcgcgtaccggaattgataggatgtgcaatatcacggtactcaccatccgcagctttgcggctcggcatagcgatgaacagccccttctccccttcgattactttgatgtcgtggactacgaattcattgtccagcgtgatggaaacaatggctttcatcttgccttctttctcaattcttcttactcttacgtccgtaatctgcataaaccaaacccctctcccgtctgttctttataatgtaaatctttcgtttttctcgatgacaatctttaagttgtcaggtgtaccgatatgcgtcgtattggcacggattgtatccctgctctccacaatacagttctcgattacagtgttgtccccaatatatacgtcgtttaatataatagaattcttaattacacagttattcccaacatagaccttcttgaaaagaactgaattctccaccgttccgttcaggatacatccgctggataccaggctgtttcgtatcatggcgcccggattgtacttggccgggggcagatcatccaccttggaataaatctccggatattctttaaagaagtagtgtcttacttccggcttcaggaaatccatattggttttgtaataagcgtccacggaagcgatgttgttccagtaggtcggaagcttatatgcataaatcctcttcagattcttataacgcaccagaatatcggttacaaaatcatatctgtcttccgccgcgcagcgttcaatcagttcgattagctggcgccttcttatcacgtagattccgcaggaaatcgtattggaggtcgccaccatcggcttctcctcaaaatccgtaatacggccgtcatcattcgtctttacaagaccgaatcttgtaatatccacttccggtcccatatctttgcagacaaccgtgatatctgcctttttttcaatatggtattcaaggactttattatagtccagtttatagattccgtcaccgctggcaagcactacatacggttcatggctcttcttaaggaagtccagattctgataaagcgcgtctgccgtgcctctgtaccagtcgctgctctcggctgtgatagtcggcgtgaaaacatgcatacccccctgctttctgccgaaatcccaccatttggaagagcttaagtgttcattcagggatcgggaattatactgtgtaagtacagcaacactctgtatatgagagttactcatgttgctcagagcaaaatcgacactgcggtagctgcccgcgataggcattgcagcgatcgccctcttgttggataactctctcattctcttgctgttgccgcctgctaaaacaataccaattgctctcattgtactccacctgcctttattatgtaatcgccgctttcaagtactccgccgtggtaatcatccggtgtggtctctccggaaatcgccgtattcctgccgattctgactccggccggaatcgtggaacgctctccgactaccacaagttcaaactgatataccttcggatcatatttgcttggtgccatctcgccttcacccagcactgctccttctcctaccgtcacgtcttctgcgataatggccttatccacaacggcccctgcgccgattacgcttcctttcataataattgaatctctgacaacagctccttctccgatcgtaactcctgctccaatcacagagttgctgatctcaccatacacttccgtaccttctccaataatactcctctcaattttggaattctcggatatgtattgaggcggaatgatatcactcttagtataaatcttccagtactcctcatataagttaaactcggggataatatcaatcaattccatattggcttcccagtaagaccccagggttccaacatctttccaatatccgttgtactcatatgcaaagattttcttactcgcctcgtggcagaacggaataatgtgtttaccaaaatcacatcccggttcctccgacaacttgatcagagcatccttcagtaccggccagctgaaaatatagatacccatagacgccaggttgcttctcggattatccggtttctcctcaaactcagtaatccggttattgtcatctgtaatgacgataccaaaacggctggcctcctcgatcggcacctgcatagctgcaatggttacatcagcattattcgctttgtgatattcaagcattacctcataatccatcttgtagatatggtctccggaaagaatcaatacatattccgggttataattctccatatattcaaggttctgatagatcgcatttgccgtacccgtataccagtcgcttcccttacttttctcgtaaggaggaagaacagtaacacctccgacattgcggtcaagatcccaaggaataccaattccgatatgcgcgttcagacgcaacggctggtattgtgttaaaactccgactgtgtctactccggaattaatgcagttactgagcggaaaatcaataatacggtactttccgccgaatgaaactgccggctttgcaaccttctgtgtcaacacgccgagtcggctgccttgtcctcctgctaagagcattgcaatcatttcttttttaatcacgatatcacccctcgatgcatagatttgtgtagctatttatgtgcttactattatagcacacttttccgaaatagtgaacaaatttttactagatttagtattatttttgtgcattttccgacattttccgtgtttcctttaatatattttttcaaatccccttccatatatttccttttttctcggaaaaccgctaaaatacgggaatttcacgggaatgttctattttatttactcggttccggaaaagcttagtcttcgctaactcatgtattataattgaaaatagccatgaattcttctgggaataagtggcacggcacagcagacacaaaacagggagtatcccccaggcttttctatgcctgaaggatactccctgttcatattgtctgttaaggtactgagccgtgaaactacatgcattgaaaaaaactcacccagccgttctgtcagtttcccggcctcctcatctgtttatttttttaactcatccggtactctcagcacggcaccctgatcggcagatgtgacgagagcggcgtatttttcaagcgccggtgttctcggtttggtaagcggcttcacttttgccagacgctccctgattatttcctccggtacatctaactcaagcctcctgttcggtatatcgatgatgattctgtcaccatcttcgactgcggcaatcgggccgccggccgccgcttcaggagagatatggccgatgcacggccccctcgtggaaccggagaacctgccgtccgtaaccagcgcacagctctcatccatcccccttccgaccagaagggaagttgtcatatgcatctccctcatgccgggtccgcctttcggcccctcgtaacggataacaatcacgtcccctgccctgatccggtcgtttgagacggcatagcttgcatcttccatagaatggaaaacccgtgcacggcctgtgaactggtacatggacggcttcacacccgattttttaacaaccgcgccgtcgggagccaggcttccgtacagtaccgcgattcctccctcctcatttttaggccggctcaccgggtaaatcacatcgttttcaaccagcggcgtaccgctcagattttctgttatcgtttttcccgtcacggtcatgtgagccggctccagcctgttctcaatcgcctttaatacggccgggatgccccgttctcatgcaggacagacatcggataccggcccgacggcttcagattacagatataaggcacttttctgctgatttcgtcgaagtccttcagggtcagcttaacatccgcctcgttggcaatcgacattagatggaggaccgtattggtcgacgcccccatggccatcacggcgctgattccatttagcagcgcctccctcgtcagaatcttccgggccgtcagcccttcttttatcatttccaccgcacgcttcccggactgcttagcaaaacggcgtttctctgccgataccgccagcgcggtacaggaatgcggaagggccaggcccagtatttcagccagacagctcatggagttggccgttcccagcatagcgcaggtcccatacgtggggagagcccgcttttcaatctccagcagctcttcctccgtcatttttcccatctgtgtctgcccgataaattccctcatatcggtcagtgtgataatctccttatccttatagcttccggccatcataggcccgcccggaagaatgattgccggaatatccactctggcggcagccatgatcattcccggcacaatcttgtcgcagccgggaagcatcaccattgcgtcaaaatgatgggcttcaatcatcatttctatcgcatccgctatattctccctgctgggcagcggataactcatgccgctgtggccctggcagatgccgtcgcacagcgcaattgtattaaattctcttgggattcctcccgcctcccagattccctgtttcacatgttttgcaatctcccgcagatggatgtgtccgggcaccatctctgtaaaggaattgacgacggctatcaacggtttatgaaggtcgtccgtgtcaaggcccgtgctgtacaacagcgccctgtgcgcggaacgttcgattccattggtcagctcgccgcttttatagctgctgtattcaaatttcgattcatccatgcccgcctcctccttctttcttcttacttctctcttcttattaaataatatacctcagcagcaaaccaatatcaaacaagtatattttgaatataaacaatatttatcttgtatttcacaattttacatgatacactgatccgtaaagtcagtatgagcagaagattaatccgcgttaacggcgggtatgatttagaaaggagaaactcttgcaagccaaccaggaaatttttttgttagttgccgaagagatgagcatcagccgggcggctcagcgcgccttcgtctcgcagcagtgtgtcagcgaccatatcaaacggatggaacagaattatggcgtccggctttttacaagaaaacctcgttttcagcttacggaggcagggcagtccatgctccactcccttcaaaagattcaggcgatcgagagcagccttttggacagtctggcaaaacgggcagggggaatgaagggcagcttcaccatgggaatcagcgcatcccgcgctcagattttcctgccctgggtgattccggaatactcccgaacctttccggaggtggagatccgtttcctcatgaacgataccgttgtcctggccgaaagcctccggaaaggaaacctggatctgtttctgggtgtcaataccccatatagcgaggatctgagctttacgcctttatgccgggatgagctgtgttttatgatatccgacggactgttaaaacgccatttcggcaaagaatacgcacatctgctcgccgaagaaacagatctcagtcagttcgcggatatccctttcatcaagagctattccaccagtgtcgtgaactcagccctgaaggaatacctggatcagcgccatatcgatctctattccccttaccagatcagtgacaccgatacgcagatctctctgtgcgccaaaggcgtgggcgccggaatcggtccccgtatgctgctatcccggattcacacccataacaggaactgcccggaggaggaatacatccatatacttccggtcaaaaatttcaataaattcctccagattgatttggtttcgttaaactatattgaaaagcccctctacgttcaggcattcgaggaaatggcggttcgcgcaatacagaagaattatatggccggggatttagtaaccccttgaaaccactggaaaaataaagtataatgacagcattgacaagaaaatacaaaaaagttatataaatgaaggagtcacattatgaacttagtaactgtaagagagatttaccgttccagagaagcttatctcgataaagaaattcagattggcggctgggtaagaagcgtcagaggatcaaaagcctttggttttgtagtcgtcagcgacggaagctattttgaaacgctgcagatcgtttatcatgatacactggagaacttttccgatatatccaagctgaatgtaggggctgccatcatcgtcaaaggtaagctggtcgccacgccggaagcaaaacagccttttgaaatccaggcttctgagatcctgattgagggtccgtccgcgtccgattacccgcttcagaagaaacgccatacccttgaatacctgaggacgatctcccatctccgtcccagaaccaatacattccaggccgtattccgcgtacgctccctggcagcttacgctatacatcagtatttccaggagcacgatttcgtttatgtgcatactcccctcatcacaggaagtgactgtgagggagccggcgagatgttccaggtaactacgcttgatctgaataacgtgccgaagacaccggaaggcgccgttgattttgcacaggatttcttcaataaaccgaccaacctgaccgtaagcggacagctcaatgccgagacttacgccatggccttccgcaacgtctatactttcggaccgaccttccgcgccgagaactctaatacgacgcgccatgcggccgaattctggatgattgaaccggagatggctttcgccgatttgaatgacaatatggctcttgctgagagtatgttaaaatatgtaatccgctatgttctggaacatgctccggaagagatgaacttctttaaccagtttatcgacaaggggcttttagagagactgaaccatgttcttaattccgagttcggccatgttacctatacggaagccgtaaagcttctggaagagcataatgatgagtttgattataaggtattctggggctgtgatcttcagacggagcatgagcgctatctgacagagaagatcttccagaaaccggtattcgtcacagattatccgaaagaaatcaaagcattctatatgaagatgaacgaagacaacaagacggtagccgccatggactgtctcgtaccgggaatcggcgagattatcggcggaagccagagggaagacgactacgacaaactggtggcaagaatggacgaactgggcctcaggaaagaagattacggtttttatctggatctgagaaaatacggttccacaaggcattcgggcttcgggctcggatttgagcgctgcgtcatgtatctgacaggcgtttccaacatccgtgatatcattccgttcccaagaacggttaataactgtgaattatagtatcggcttaggagctgccgcgtcggatttatctgcggcagctctgtctggtattaacggcttctggaaaaatttgtaacggttccgacaggatgggccgttacacagaatttactattaaagggggatcattgtgaagtttatacataccggcgatatccactggggcatgtccccggacagtgacaaaccatggagcagggaacgggcccgcgatatccgcgacacgtttgccgctatcattgaaaagacaagaaaaacaggggccgactgcctttttatcgcaggcgatctgtttcaccgccagccgctgcaaaaggatttaaaagaggtcaactacctcttttccaccatccccggtgtccgggttattataatcgccggaaatcatgacaggatccgcttaagctctgccgtcttaagcttttcatggtgtcccaatgtaaccttcatcgacagcgaagaactgacaagctactatttccgcgatatcaacacggaggtgaccggcttcagctaccatactgcggagattacggagccgcgtctgaaccaggcttatgcgccgcatgacggccggatccatatcctgattgggcacgggggagacttgaaccacacgccgatcgacaaggccgcgctggcagactccggattttcttacatagcgcttggccatatccacaagccggaagttctgattgaacgcaagatggcttactgcggctcccctgagccgctggataagacggagacaggcgcccacggtatcttctacggagagattaacccatccaccctgctggttaccaagcttgaatttattccgatgtcaaagctgcgctacatccctttgattgtaaatgtcacccctgccacaaccaatacggagctatgccttaaaatgtcccacgagattgacaagcgcggaactgataacatctaccggttccgggtacgggaatgagggatcctgatatcacatttgatctggactccctgctgctccgctataaaatatccgatatcctggatgaatcagaaccggaatatgacttcagcgcgctgtttgccgaacatcccagcgatatgatcggcttctatatccgtgcgcttcagaaacccgatatgagccctgtggaaaaaaaggcgctgttttacggaatccatgccctgcttctcacaaccgatgaaaggagttaacaaaagtgcgttttctggatttatacataagcggatttggtaaatttcataacacgtctgtctcctttgaggacggcatcaatattgtctacggcaagaatgaagcaggcaaatccaccattcacacctttatccgcggaatgctcttcggcatcgaacgccagaggggcagggccgccaggacggatacctacagcaagtacgagccatgggaaaacagcggaacctacgaaggacagctgcgcctggaatccgacggtattgtataccgcattgagcggagctttcagaagaataaaaaagaatttatcattgttaatgaaaccctcggaaaagaggtggagccgaccaaggcatttatggatgagctgctgggaggattaagcgaaacagtctataataataccatcagcatcagccagttaaaaagcgccaccgaggacggaatgatctcggagcttaagaattatattgccaacatgaatacctccggcaatatggccctgaatatcactaaggccaccaattacctaaaggggcagaaaaaacagtttgaaacacagctcagccccgaggcggcgagaacctacacgatgcttttaagtgaaatccgcaatattgaaaaagagatttcctcgccggaatatgagaatcaaatgcaggaatatgtgaagatgcgcgacagtgttaaacaagagattgagttgaaccagcaggaaaaggatgagctggctgacaaagtactcagaggacgccagatgctggacgactatgaattttccgatgaggcctccatttccgcatatttaaataatgccgaagagatatacagctgctataatgactcgaaagccgttacgcagagcggcggaggacggatggttcccatcatactgtttttgctggccgccgcagccgcggcaggctccggatacttcctctactggtatttttatccgtataatacgctgcttcctgttctgccggttaagctcaaaccttataccacgggtatggccctggccatcggcgcggctgtgctgctggccggcggattctttactctgttccgcagaaagcgccttctcaaagaggcaaaactctgtaccgccaccctctcggagatattcaaacgccatttgggcgacagttcaatcagcgatgaggccatggaagccctgcgttcccgtctgggcgagtttacaaggctttgccagatgatggcgaaatcagaagaaacacttaaattgcagacggaaaaaatctcaacgctgcgggagcgccagaacaattgcagcgaggtgattgagaaacagcagcgcatccagtgggagctggaaaagaagctggagcatctggccgactgcaaagacagggcggccgcgctgaaacggattatcactgagaatgaacggctgcgtcaggatatcgcggcaattgatttggcccaggagacgatgcaggagctttccatgtccatacgggactctttcgggctgtatctgaataagacaacctcggagctgatcagcggcatcaccggcggcatttataccagcatcagcattgatgaaaacctgaatgcattcctgaatacaaagaaaaagctggttccactggagcaggtcagcagcggcacggccgaccagatttatctggcgctgaggctggctgccgccaagtttatccagggcggggaagaccggatgcctctcgtctttgacgacagcttcgtactctatgatgacgacaggctgcgcacggcgctgacatggctttccaaagcctgccggggacagattattgtatttacctgccataagagggagggacggattctgaaagaggccggagtggattataacctgatcgaaatttgatttgatttccgatattagaattgacggaccggccgacggatacggccggtccgtataaaaaggcattcagtccgctcccgcggccggatgcctctttttcaggctctttgtcaatagttggggtgggatttgttaaaatcccgccccaattctatgaaaagggccctttttatgtttagttccaggttttactgattttgggcatgccaaataagcctccgcattaccgacctttttatcctatgatgtacagtgaagtatccgggttcggaaccgtttgaaattccggattccgtagctgctccgttttaatacctttatcttgttgttaaatccttctgtgggaccatttgtcagcccgtatttaaaggcattcaggatttcttttcgccaggccctgtaggtcttagcacaggcctcaaattccttgatcccacagctctgcgcattcgcaatccagtcatcaaattccctctgctgctgacgatacgcttccatctggcagatatcatagaaccactctttcatgcggtgtgccagacgcagatcctcgctatagtgaagcattaaatcacaggcctgtttgttctcatccttcagctttttgtagcgggtcagaatgagtttccggctgcgtttataatacttacgcagagaaaccggcatggagcgctacagccgtttgcgtacattttcaatcgcccatgtcacctgccggatgaaatgatatttatccacgatgattgtagcgtttggaaagaaggtttgtgcaagttcggtgtaggggcgccacatatcgcagacgaagaactttaccttcaggcgttctttcctgggaatgttccgccaataatcagccagatggctctgggtccgatctgggagaatgtcgaggagccgacgctttttcggatcaaccagaatgcactgatatttaccggtagaagcattgcctttgaattcgtcaatggaaagcgcttgtggaagctggtcaggcggaggatagcaaatcgtgtccagaaggcggcagaccgtctggacggaaacaccggtaagctctgcgatctgttttaaggaaaaggtctgccggagcagggagacaatgtaaaatgccagcctgcgggtcctgcggtggtagctggggaggaacgaatagggttccgtgaaccgtttgcggcagtatgggcagaggtagcggcgtttgcgaagaagcaggattacttgttttcccagtaagggaatgtcctggacttcttgtaaacggtaatcatgaatccgttttgttttagccccacagcagggacaagtctgttctaccggttgggactggatgaaaattttaatgaaagagtctgcctgaaccacttttttaatagaaacaccttccaagttaaggaaagccttggtataattagggtacatctataaggggtcacctccataacattaaactttggtcgggataatgcgtttaggaggcttcttatagatgtattttattacaacgaaaagaatgttggaagtgtgcttttcagcacaccccaacattcagtatagaaccctttttcattgatgacggtgacctgtgcgcagagtgcaggttatcgttagatataaacatgaccggattgttacggttggattactttagcccagatttccatacttccggtctccgggctatggtccgcgtaccgctccgcacagaacggctccgtctgtaatttatgctttggaatccatgttccgtaaaaatactgctgcgctttatagagcgcatccatcacgagagcttcaaagttttccgcctcaaaggagcagacaatatattccccttccggaagtttccactccctgtatccggccgccgcttccgtcccggccctggcccctgcaaaatagttaaaataccctgggtccgggcagggataagacactcctatctcctcctccaggaacagaccggatgtattctccttctgtttatgaaagccgcgccacagaaaatccagcggatcaattccggactccgtccccaaaccggctgtaaactgaaccggcatcgtcttctccatgccgataaagcggattggctctttcacctgacgcctgttaatctccaggacgattccgtcggtgatgagcggcacgccttcatcaatcagcgtatagtggagcagaagctcaggctttgtcatccggttgagggtttttggatggctcctgtattcttccggcgtcatcccaaaggtagacttaaaggttctgctgaaatgttcgtgggaggaaaaccccagctccaccgctatgtccaaaatccttctgtcctttgaaagcagggcctccgttgcttttgccatccggcgcagcctgatatattccgcagccggcttttttaccagacgcctgaacagcctctgataataaaaaggcgacaacgctgctttttccgccaaatcccggatactgagttcctcgcccagatgtgattcgataaattcgattgattcctgtatttgttcccatgcatgcatattaagcacctcctgtatatacagaataccatttcccgcctggctgcgtttgactgctgatgccctgtaacaaatcagaccgcatgagctgttatgatccccttctttttcattttttatttttatcaaaatgttggtaatctttcgggttgttccagtccccgccccaacggaatccgtgtttggcaaacagtttatacgccagatcctcatgggttattacatgaggcagtcccgtatccctcttaatatagtcattggcattggaatgctcccatttcggcgaaccggaggaataggaaacgtaagggttctgctgcgggtttatatcaatcgctctgccatacgcatgattcgacagatttccgcccccggagatttcgcggtagcagaaggccgatgtgttattctcatcgatagacgcggaatctgaagtctccgcatctcctgtccagtagttgtctatcagatacatagactgaatctgatacccggaacggaataattccttgaatatgcttatcacatcatcctgtatatccttgttaacgatcatttcccccacctgaatccggccgtcgaaattataatgcggcatcttcaggtaccgcagggaactgagcggcacatagggattatcacggtaagatttcccgtcaatgcgctggtgcaggttatccccctcctcgatctgccagctcataaaatagcggtcgagatggtcaaaatcgatctgctccgtatcaagaaccgtaccgggcgccaggccgctgagactttccagccgtaccggctgtgtttccggttccgttacaggttccgtttccggttctgtctcatgccctgtttctgctccggactctgtctccagctctgttccagtccctgtttctgttccggtttctgctccggtttcattcttagactgctcctctttccccggcccagtcattccgccgctgcctgccgacggctcaccgctccccgtcaccccggctggtaccgcggatgcgccgctattaccggttccgcttgtctttttaccaatgtaaaccactgcagccacaattaataataccaccagtattccggcaagtatccatgtcgtatcaactccgcttcggttcttatgcacgctgcggttttctctgtctttcttgttcattttttatattctccctaattagttaagcaggtgaggacgccgccggtacggccagcggacgggcccactcagcacttccgtgtgcgggaaacacgataagccttcaatgcgccttgattaaaaaatagtggaagatttatatcggcctgccggaaacacgtagtggccgcgacaaggccctccccatttaaggttagagacaatcagcgcccggaacggaccatgtccggtatgcgaaaaccttcgcctgagtcttccgtccccggcgaaaccctgaccgtgggaagtaggcggaatcaattgcggaggggacatgggagtccgccggtgcttagcgaggtccctcacgagctgtcgagtaaatatgccccttgcgtggcatacccctcacagaatccggacgtgcggatttcccgcatccggctctttataaggttcattgttcgtcagttcaagcgtatatactcacatagattttaggtttcgccaatgggtgctgcttcatcatttccctgaacccttcccatgtataacttttcttctggctcctccggttcagccacttgtacagcgtcttttctacctcccggtagaacaggccgatactccggctgttatcggtcagtccatagtaatggtagtatccaactaatatctcattcagcttcttcacctgcacggaaatttccttatgacgctcctttttgatttgcgcatggatttccctgcttttcttttgcagcttctttctgctggttttcctcttcacccggaactttccgttcctgctttctgaaacgtagtgtgtaaagcccagaaagtcaaaggttcccgtcttctttccctcccgctctgctctttcttttgcaaagcggccaaattctatcagacggctcttttcttcttccaggctcagcccgaagtgctccattctatgtttcaagcggctatagaattcttctgcctcctctttatattggaaacaggctacaaaatcatcggcatatacgattaggccacagtatccccgcatcttcggcttaactttttcttcaaaccaccataacagtacataatgcatatagatatttgccaggatgggcgaacacacacttccctggccggaaccctccggactttcctgatacccataatcctccatgattcccgctttcagcgtccttcttatcagacgcgtgatgttcgggtctttgattcttgattccacaaatctttctatccatttatggtccagatgattaaagaaaccctggatatccgcatccagcacatagttcgttttttctctttccagcatctgatttagcttcctcagcgcctgatggcagcttcggcctggtcggaatcccatcatgttgtcataaaactgtggttcaaacacagcctccaggatttctctcagtccctcctgtaccagcttatcctcgtagcagtagatgctgattggcctggtctttccgttttctttaggtatctctacctttctggccgcctttggcttatatgcctttcttttcaggctttccaccagtctggccagattttcttccagattcttttcgtagtcttctttcgttattccgtcgattcctgccgctttctttccatccatttgttcgtggcaccttttcagcatttccttattaatcagatgcccgacggatgtgaataccaactccggttgttcgcttgataactgcgatattctctccaatttcgtttccatcataggtctacctctgtgtatagttgatgtttcctctttgatattgccttatatggcagggctttgaggattgatgccctctctcggcttccctccggcggcattacccgctttctccggtactatccggccatccgactgcctgccccccttttgccttcctcgcgtccggcatacccatgggaacacacttcccacgggaggggacaggctctccccagttgacgtgatatcattgtgtaacgtggctggctctcagacaccgcggcagtgtgtgaaatctcaccattgcgataaacccacctgttgccttccgctatgctaaaagcgtcggcctgccggacctgcatcgatttcggtactctatcactttcagccctgttacctgactgtctacgcttagaaggcagcattactgctaccgactcaagactcgctaccggtggtgtggttagcacctttccggacaggatttccacctgttaaatatcacgccctttctgggcgcactagcattccgatgcgcactccaaagagtgcaaacggtccccgcagcaattcattccggccggattcccccttcacgacaacctcccacggggacggaagactcagccatccccctcaccacaccggacatggtccgttccggacgcgtcctcctaacctctgttaaatctccattatgtgaacttcctctaattatacagacgccatacctgcctggcaataataaagtttacaaaaaggcgttttaaaagctgccgccagctcttaaaacgcctatcatactaaaactttttactattaccttgcattgaatcacgcgattccgttttactcaggccctccccacctctgcgtcccccgccggaagatccgctgccgcctcatcacagccgctccggacgcagcagcggctgtaaatcatcagagacgccaggattaaacctatatccgggatttacacaaccggccttcctatgataagggggatatcgtgcttgagattcatcaggaaaacgtggaaaacggccatttccttacctataactccattggctttttcgtggagccttccccgggcgtggagggcacacggctttgcgtcatcccggccggaacctttatcgtggcctgtcatgccggaagctaccagaccatctcaaagacttaccggaagctgtggaattatattaagaaacaggggctgaccgtcacaggcaactccgtagaaacatctattatcaatatctcaatgacaaataatccaaaggagtttgtcacggagatccaaataccggtagaaatgccctgaaacggggacagatgagataagataagaagccaaaaatccggggcctcctgaatgcagactcaggctccggcctcagccttcagactgattcctgtgacacacaaaaggctgcggtacctgtgaccgacatgtcacagtgcccacagccctttctatgcaattacttcaataactttaatataaccttcaatataactaattatctgtatttttccagtttgcgtccggctacccagccctttgtcatccatgccacaatccacataaccgctacaattgcaaaacaagcgaccgtgacaatccatgaaccggctgtccccatcgtggtaatcagaatcggcgggataacctgcaggcctatgataatgggacggttaaagatatctgagataccggagtcttctattccccggctcttcagatccggatccacaacgcgctgcagcaatacacctgtggcagcaacaccggtggcatgtccccacatcatcatgttgcgctcaaaccagtcttcctccgatgattttccgccaatccagagaaaccacagccatgtggcggcaaatccaagagcacatatcacaatcaacggaaccgcataattcataactacggtcaggttcagggaaccgatgcctgatatcatcagaaaatcagttgccgttccctgaatgcgctgaatggagccgcgatccacatacttgtatgctccgctcttgttcaaaagtgaattgataatcaatcccgcaaacagggaaagacagaattccgggatggatactttgtagttgaaagccgactgtgtccagcctgcaaaccaggcggaagccatatatccaagccacgaggcaaaaagaacaataccgagatggtatcccagcggatcgaggcagattgaagccacggtccccttggaggttgacttctggttctcaggcggtacaagtccggttctcatatcaatcggaagctcactcggattttccacataatgtgtatatcccttgcgtgttccccagttgataattaaaattcctgtgataattcctcccacaattccgatggttgcacaggtatatcccaaatccgtcatgtcgggcacgccaagatcggccagcgatttcccgactgcagcagccgttccgtggcctccatagaagccggtggccatcatcaggccgaaattttcattcagagcaggatacagctttgtcagcaccgtgatcgttaccagcatgccgatgccgtactggagtacggcgataccggaaatattaaaaaacatacccatgatcttggatccggacatagcccctttcttaggcctgtccccaatgggcgtagcagcgaaaaccagcacgatcagaacgctggcgtaagttccaaaggaactggacagcgggagaatcctgcatacctcccacggacttttcgggcccagtaacaaagccaggacaccggctaaaacagccggcgggatcaatgccttctgcagacattttaccttagcccgcaaaaattccccaatcagcagcagcgttcccataatcgctgcgtcaaccatcacctgccatatggcagaactcatagtcaattccatataactcatacctcctcacagaaagtcacatcaaatatgtaccaggctcattaactataaaaccttatttcattaaatccattctatacggcggaatcatcgctgccttcaaacagcttcaggttcccgtctctgtcaaaagggacctccataaatccgctttccacacgaatcggacggcaggcagcatcgatagcggctcctgacatataaatctcttccagatgctttgtgtcggggatgataaccatccggatctcttccttctttatttttccgcacagcttgacacatgcctgaaatacggccctgtcattctccaccaccatcggaagccgggagctgttgggttccgtggaagtcagtgtattgacgtaggtgctgccgaaatcaatctgttcatacatatgcctggggataaagtcggctaatcccataccgttggcgtttccctccgatttttccgttatgttcagtacgcccagctttatcgtcctgggaccgcctcccgcggcattcgtatggaaccgtcccacaatgttggtatccatcccggttccgctgatctcctttccaatctcccccactatcagcacatcgatttcattgagtgcaagtctggccatcttattccaggcatcctgcagataatcaggttcatcggccataatctcttcttttcgggaaacatgtaccttggcaagtcggccataaccgttctcgatggtagagacgccgcagattacattgagctgctccaaagcaacggaagcgacggctatgatattttccgccatattctcataccggagaaaatgggttgcttccgcccccttctgtttcgcaagacctatggcaagcatctttacaagaccactttcataacgtccccgaaaggaggtatggggttttacccggttgaacagtatgatcccgtcggcctcacaggcattcttgtcaatatatacgccaagtccctgcctcgtggtgccaatctggttcacctccatattggaaacaaccggtgcgcctatggtttcctctgtgattccgtacttttccagcaccagctcctgccctctcgccgtcgctcctccatgactccccatcgatggtaccagaaaaggaatgcctcccttttccttcacaaaagctacaattgtcttgagcagcggcacatatccgtcgattccgcggctgccgcaggttatcgcgattctcgatccctttttaatgggaagatttttttcctctaatagtcttttaagctccctttccggatcctccagctcctccctgttaaaaaactggcgtaccctggccaccccgggtatctcgaaattctgcaaaagctgattaatttctgtagatatggtaactcccctttcttatattgttacggcagtcaatccttaaccggagatcatctcctgccccgccgaatagggcgccggaaccagatttcgaaaggatttgttcaaaaagtggctgatctctccttccgtggcaaataagaaatcaaagggcttattaaaatatctgcaatatgcccggcactcgcccggataaaaactgccgtttaaaaccttacggctgtaatcgctgcgactgacgcctataatttcccccatgtcctgttccgtgagacgaaaaaattctttttggcccaacaaattgggatacatatgtagcactcctcctttcttggcgtatcgccaaatcacagtgtcattatattctcaattcgccaatatgtcaagatatcagggggattttgttgacgatacgccaaccatatgatatgattcaggcgaaggtgaggtgtcgtaatgagttttaccgaaaggttaaaagaagcgagaatttccgtcggatacacacagcagcaggtagccgatgccatggggatcacgaacagcacttactgcggctacgagacgggaaaaaggcagcctgatgtggcgaagataaagcaattggcaaaaatattaaaaacctccggtgattttcttctggaaaccggttttgtccctgtgggcagcgaggaagataagacagatatttcctgctgccatgaagactacgttgcggatatatttgcgaatttcgaacttttagataatgattataagaatgttgtggagaatctgattatccagctgctggatatccagaagaagaatcagcagacacaaactaataaaaagtaagcgaactgcaaaagttcagagttgaaatagccgtcaaatggtctgtgaaggtaacatttcagacaggtctgcgcatttgctgcgcggaccgtgcgaaaaggcagcggctgcaagcatccggctcatcgcgcagcggttttcattgaaggcggtggcctgtgcgcggagcgtgcaggttatcgtaagccggatgccgtaacagtccatgctgtccaaactgttacccgtggagcagaataagataaatattctgccttcacagccattattccgtgatggtttttacataaaatcccgggacaggcatacagtgcggcgggggctatccgacaggccaagctaagcctttattccctctataattttcccatccttgccttccaccaccacaagctctctctgggcattctggtcactgtccttgtacatcatcgcgtaccgcttcggcggtgttcccgtcagctttttaaaggttcggatgaagtgttcattattccggaaacctacattttctccaacctcctggacccgcatcccgtttcgaagcaaagacctggctttcaaaatccggcagttgatgacataatccatcaggctgaacccggtgccttctttaaaaatatggcacaggtggtatttactcatataaaatgcatcggcaatagactgggtcgtcatggcctcccccagatgttcctgtatataggtaaggatcggcgccaccttatcgagactaggatttgtatgtacctccccgtcctcggcctcattgaaatgcgaaaagcaggtcagcaaaaaggtcagcaatgtgatcgtctgtctgatatccccgccaaactcatttccgaaatcctcggcaagcttgccatacagactttccagatattttgtggcctcctccgtcagcgttgcgaccaggccggagcgcttgcttctcgcctggaaattactctgaagggaggaaaattcgtgcagcatttctgatgaaatatgaaaaaccatacagcggtactcttcgttggcaacactccggtggagaatcgatgaatcgatcaaaaaaagctgtcccctgtacaggggaaacacctccggctcaagaaaaaatacgccttccccagcgatacacagcacaatctcaatgtcctcatgaaaatggggacgatccatggagtaggtgtcattcttgctgatatgaatctcataatggcattggatcatccctagtcttcccctctccgaaaattttcctctctccttggtggacagatgtcgctcatgtaactacgtttatctttacatctataattttactataaatcctcttttcaatggtactggattatttttccagttcatgtccctcctgtatccatagtctactctcagtctatctttttcacctgtttcttacaagggttgtttcctttctgaacaagataaatcaatattctggcaattttattctttttcttgcatttttgtgcggatttttcacggtatttgctcataaaaatatcccataaattcaattattatatggttattttaccaaaaagtttagttaatcatatttttttctgttttatataattatacggtctattttttctataatattgtaggatttatgctttgtcattcaaccgcaagatacatcaagtttattccaatcaaatgcaggtatttacagataaaagatgctataaatagatcataaagttgatgcgcaaaaactttactccatgatgccatacaggcttagcaagaaagggtgtgttactatgagcaaaaattatgacattattcattttgaggccctgggagaggaagcgaagcatctggtagatgagacaaaagccgcacaggagtgcaatttgattccaaaggacctaaggtatcttgtaatacctcagactttacaggaatttctaaaacaaaacccagatgaggaattgcctgagattatcagtatcaaaacgcattctgtcctgccggcttcttatctgtcaggaaagaaaaaaaacataatcacaaggagtgcaggatacgaccatctcgaagcactttgcaatgtggctaatattacttctttgagaaattattgtgtaaattccgttgcccaaactgctgttaaattcatgtatgcggcagcaggactactcaatcagtatacggtaaatgctgctacctttgagcgaaatatgactgcctctttcatggaactaacttccgacagaatcgccaccatctttggcattggcaaaatagggaagcggacctacgatttgattgaggcaaacgggctcagtgttcaagcagttgatattcgcgaaaacgaactaaaagggatttatggcaacagcataaattttgtctcgaaggagaaagcaattaagaacagtgacattattataaatgcaatgaatcttaccagacttcctgatagtatcttctataatgaaaattacttttccgaagaaattcttcggcaatgtaagaaaggtcttatattcattaatgttacgcgggagaaattgcaccggaagccggtcttttacatttataccaggagggtctgattggtggtatcggattagacgtatttactgcggaaaatgatttttcccagtcactgaggaaccacaaggcatacagtgatgaaaacctgcttgccgccaaaagactgctggagatggctgagaacaggacagctaatatatatgtacagcctcaccaagcattcaactccgacctggcggctgcggctaaggcctctgatacaattaaacgtatgattggatggtttaagcgcggcaaaaccgggtttgacgaacagcttccttattatagcgaaacaggttgattcccataaacaagctaccagagagaggagaaaagttatgtctgaagaagtcaaaactgcaacgtttgaaacagaagaaggcgctttaaaggtaaaaaaactcaccccatatgaggctgcctttatgattatcggagtcaacattggatccggaattctgagcttggcctattccgcacggtttggcggctggcctattttggctatgtggctggtcataggcggtgtcctggtcacagcctccatgctctatgtggctgaggttgccctgcgcacgaaaaagatactacagctccccggtttggcggaacgctacttaggaaacacagggtcggttttaatttttattggtgtatgctgcaactcattaggctgcatggttgcctataccaccggcagcggtgccatcatagccagtttcctgggctgttctgagacggccggcggcctgatcttttccattcccgccatcatcgtagttttcctgggactaaaaactaccggcgtatctcagaaggttattagtacttccatgattattcttttggccggactcgtaattgctacattcattaataaaaataccgatgtcagccgggccatgtatgctaactggagcttcgcactgcctctgctgaacatggcaatcttctgccacattactcaatatgccgttcccgatattgtacgcggcctgcgccacaccccagaaatgattccgaaggtaatcatttctgccaaaattgtggtaactgtattcctgtgcttagtcccattgtctgttctggccattacaggagcagaaaatgttacccaagttgcaactattgcctggggcaacgctcttggtcctgtcgcagccattgtggcaaatttgtttgctttgacagctatgctgacctcctactggacacactgcagttccatgctaaacaatgtggtggatattttcaagttcaaggatgaggatgaccgaaagaccagaacattagccatgctggtcgtggctggagttcctctggccctagccttcagcggtctggtaggatttgtagacgccatctccatggccggtgcatttggcggtatcatcatgtcggttcttcctatttttatgctcaacaaagcccgaaagactggggataaccaacctccctggacatgcggctggtacgctgccaaatgggtacaagggctgattatcatagtcttcatcttttctaccggatataagctattgagcatgtttgggatgctgccgacaggctggtaggggatggtaacagttcatgctgtctgaactgttacaaggtatgaaattggtttattgctggactcaaaacaacaaagacaggaggccttacaaatgagagtgatttccaaagaaaatgcagtatttacatttaatgcagcccatccacctaaatgtcagattgaaagcggagaaatattctggattgaagttgaggatgcttatcgtgggcagatcacagacgcgtcagtaaaacgaccggaattagacaccactaaaatcaactggtccacaggccccattctggttaaagatgccaaacccggagacgtgctttgcattgaatttcttgactttgaatttggcccacagggagttatgccctccagtatgggattggggttactcggtgaaatgatcacacagccggatagcaaaatcattccaatccgtgatggctacgcaatcttctccgatgaaattcatctgcctttgacccccatggcaggcgtctgtgccgtagcccctccgccgggcttggatctgcgctgcgtctatccggagatttcggcggtaatctggataccacaaaggtaacagttgggtcaaagctatatcttcctgtatttaatgatggagcaaatctctgtattggtgattttcatgcctgcatgggtgacggcgaagtcagcggaactgccattgaaaccccgggacgtggattagtcagagtcacactgcgcaaagactgcaaaatagaacgccccgtcatagagaccaatgaggctatctactttctagcttcagcagaaacactggatgaatgcgtgaaaatcgcggtcaaagatggaattaactatctgatgcagaaactagagcttaattttcaagatgcttaccggctgttcagcgccgcctgcgatactcaaatcagtcaagtggtcaatccattgaaaacggcaagggcacgttgtccaagattccatgagaaaattggcagattgtaaaaatcaaaaagcaaggggccctgattaaagagcgccttgctttccttctattcatccgctgtaatcacccatttcacacaattatcttccttcgcccgaatacacggtagccctccataatctgagaaagcggagaacggtgcgtgatcaggaaatccgtcctgagctctcctttttctatcagtgacagaagtctgggacagcttgccgcatcgactccccctgtcttgaatatcagatttttgccatacatggacggcagcggcagtatctgagcctcctcatacatagcgactatcgaaacgactgcattcggccttgcaagcttccaggccagttcaaatgtatcctttcctcctgctgcctcgattactgcgtctgcgccccttccctccgtcaattcccggaccgtattctccgcatcctgcacgccgttctggaccgtaacatctgccagcctgttcttctctgccagcctgagacggaattcatcgcggtcaattataacaaccgttccagctcccagatatttggccgactcggccgcgcacagcccgaccggacccgcgcctatgacagcgacacagtcaccctgatttatattggcaatctcagcgccccaaaagccgctggaaagaatatccccggtaaatagcgcctgttcataggttacggaggccggaatcggtgtaagccccatatccgcataggggacacggacgtattcggcctggcagccgtctatcctgcatcccagttcccatccgccgtgttcacagttgttgacaaaccctcttttacaataaaagcaggttccgcagaatgtctcgcagttggccgccacacgcatgcctgcgctcagtttaaccacctcagaacctgtctcaaccacctctcccacaaattcgtggcccagtataattccgggtacggctctcggcaccgccccattcctgatatggagatcactggtgcagatcgttgaacgaactaccctgacaatggcatccttcggatcccggataacaggtaccggccgctcttccaggcgtacatcgccaataccgtggtatactgcggccttcatggagaccggcctgttattgataaattcttctttcatctttccccccgttcaacgataacctgcacgctccgcgcacgggtcaccgtcatcaataaaatcagggcaggaaagtcctcataaaaaggaagctttccgccctgtttctatcttattccctgataccggccctgtacttctccagcagcctgttaatgcgtcccgtagggtttaaaagctcgctgagagatgcatcatggttcagattgtcaataatcaacgctatatatttactcatatctacatcgatataatacggccttgaaagcagctccggcgtctgatagatcaggttcgtagtcagaatccggtcaatcaggccattgccgtaatattcgtcaaacttctgaagcccattggtaaagaggccgaacgtagagcagataaatacctttctcgcctttctgttcttcagttccttagccacatcaagcatactctcaccggaagaaatcatatcatcgacgataatgacatccttgccctccacgctggcgcccaggaactcatgggccacaattggattgcgtccgcctacaatcttcgtatagtcgcggcgtttgtagaacatgcccatatcaagtcccagcacattggcaaaaaagacggcgcgggacataccgccctcatccgggctgataaccatcatatgatcactgtcaatctcaagctctttctcatgctttaagagatgtttgataaactgataaatcggctgtacggtttcaaatccttttaacgggattgcgttctgaacacgcggatcatgagcatcaaaggtgatgatattctctactcccatgcttaccagctcttccagagccagggcacagtctaaagactcccgtcccgatctcttatgctggcggctctcatagaggaacggcataataacattgactctcctggccttgcctccgacggcggcgataattctctttaaatcctggaaatggtcatcgggtgacatatggtttaccattccgcacagggaataggtgagactgtagttacagatatctaccagcagatacacatcatcaccgcgaacggaagcggaaatccatccttttccttctcctgaaccaaatctcggcgtaccggctccgattatataggtatccctctgataaccggaaaatgcgatcgtagctttatgctcgctctcccgctcccttctccatgataccaggtaatcatccaccttttttccaagctccgcacatcctttgagcggaatcagcccaagggggccaaccgggatcgtctcaatgattttttcttcgtacagcatctctttcctccagtaaatcagtcttttctattcttgaattttatcagcccgtcaaatatcagcggcggcctcacaaacataatcatcgtctcatttatatcattatgcaccttataagtcaagtaaatcaaggggacagactattatttggcgtaacggttcagccatgatgtattccgcggggtgttttcgctgttttttcgaaaatcccgagttgtgcggcgcgacgcgatgaaaaataaacttttcaccacaatcaacggcgtttttttgccgtttctgtgcatcatttgttacgatttagccgaaggctgaactgtaacaatttggcagcagtagtggcagcggaaagtccactcctccaaacctcagctaaattccttttattttccttccctggcctctttgagcttcttcctaatccggatatcttcaccataaagaggtatcactttatactgactgacaattctggacataatacggtccgtaaactcatcccgcatttcattgacaggcagattggtggatataatcgtccctttcttccggctcattctttcattgatcacatagaatagctgggatgtggtgaatgtgttgaccagttctgtgcccagatcgtcgataatcagcagatcacattccagcagatagcgggagcgatcccggtcttcatccgtggagtcattggaaaaacgctccttggaaaatatctcaaacatctctaccgcctgaagatatacgacggaaaaacttcgttcgatcagttctctggcaatgcagttgcttaaaaatgtcttgcccaggcccgtcttgccggtaaaaagtatgttgtcctttttctgaccgaatgcgtccacatactgcctgcatgtatccaccacctggcgcatgtattccctggccgtcttgccgcttcgcccgtctatcttcgtatcatcaaaatattcataggaaaaattatcgaaattctcacgcttcagtatttcccggatattggactgggcatacagaaggttaatttcacgctggcggaagcaatggcatttcctgccgttactgtatcctgtatcacggcagtccggacattcataatgcatctcaagatagtcgtcaggatagccgtaagccgccagcagtacctgccgttcttccctaagcccggcaatggtcttcctgagcttttcaaccgcctccctgtcgccatttaataactgcttcgcgcttcttacggcggcggaacttatctcgtcattcatctcccggatagccggaatcctttcatatacctctttggtacggcgatccagttcatgtttgttatttaactgtttttggttataaatccgcatgattgaatcatactgggaattgctgagtgccatttccacctcctgcttgctgtacagccggcatcctgtgctgtccgcagcacggctgaaccgttacgctccgttactcacccttctgtccggcattgatcatatcccagaccatctcgtcataatcatatccatgttcctcaagattatggaaacggttccccgaccgggccggaccgctccgggccgctgcctggccttcccccgttccccggccgctctttttcgattttgcctgttcctgttcctttcgtatcttatcaagagcggcaatatcgctcatcgtccttacccctgcatccttccaatcggatagaatcctgtctgcatactggaagctgggattatgtatcgtcttaatggttctgttacaggcctccaccacgatctcttttgtgaaaccgtaggtcctgaaccacttctccatcaattcaaattcggaatcggccggatttcgtcccgtcagccccatggccttcataacagcaaaggattccttggaaaagcttctggaatacgcgcgcgcctcctccacagtcatgatattcttctcatgccagctgagagctactttttctacatagcgcaggcttgtatgcccgttctgcgcacagtattccaccaggaattctatgagttccgacggcatattcaaattcttgtatagattaacgaatacctgacagtccacaggcgtaaacgttttattcaaatatttctgagaaatataaaccagctgggtgaatgtctcatcatccgacagcgattccaaatcgcatacgcaggaagcgcttgtctcccgtgccgcacggctttcggggagctgctgcacggagttcttgtcctctgcctttacagcctcccttaccccctcaggctctttcttacgggcggcaggctccttttcaaagaccccggctttctgccaataggcaaaggcccgccgtacatcagcttccgtatggttcagcgcgtccgccaccgcttccaccgtaatctccccgccctcatggcggagcaggtacagatagaccttaacgtattctccgttggcatctgccatatactgatcaataaattcattggccacaaccgttatcccgcagaaaaccggtttttaaaactgagctccatcccctcaccattcctcacttaaattgtcaccgttccggacgaaccgcaaccttaaaatccacaaattcactatgcctacatcataacacaggtctttccaaaagaaaataggcggggttatccacagatattggtgtggataatgtggataatgtggacactatcgtttgttatccactcgatatatgaactattttgtcgaaacccttgatttatcaatgttatttgaatttcatcctctatacacgtagggcaaaaaaaatccacatagcttctttacataaaatgttgacaactatgtggataatgtggataactagagccccaacagctcttccccaacctttacaatgtctccggcccccatagttatcaacaaatcaccttgtgtacaattttccaaaataaatttttccatatcgtcaaatgtgggcagataccaggcatcgactcccttttcctttaaaagcgcaacaatatcggcagaactgactcccagcgtgtcagtctcccttgcaggatagatatcagtcagcataacgcagtctgcgagggaaagagcctgtgcaaactccttcataaatgctttcgtcctggtgtaagtatgcggctggaaggcacagcaaatacgtttatgcggataattctcagccgctttcagtgttgcctctatctcctggggatgatgggcgtagtcgtcgataatcgtgatccctttcagctcccccttcttttcaaatcttctgttagttcctgtgaatttcaaaagtcctctgccggcagcctccagcccggccccggactccattgccactgcaattgctccaagggcattgtatacattatgctccccctggactccaagactgatccgctcctttttctctccttttatataaagatcaaaagaaggccttgcatattcatcatacacaaccgcgtcaaagctgtaatcattttccttcgaatttccgaatgtaacaacctttccggccgcaccggccgtcagctcccgccagttctctatggtcccgttcatgataatggttccgttctccggtactttctcaataaactgccggaacgaacggcggatatcatcgatatctttgaagaaatcaagatggtcttcttctatattaagtataactgccatggtcggataaaatgagagaaagctgttcgtatattcgcaggcctccgtcacaaaaaattccggaccgccgacgcggatattgcctccgatagagtttaagatacctccaaccgatatggtgggattgttgtctgcttccagaaagatctcggttaccatggacgttgttgtcgtcttgccgtgcgtcccggcgatagcgatagcttccctgtagttcttcatcatctggccgagaagctccgcacggctcatcatagggattccccgtctttttacctccatgaactcaggattatcctcatgaatggctgccgtatagacaaccgcatcgataccgtcttttatattctcagctttctggccgtaatagacaaccgcgcccttcgcctccagatgtctggtaagctctgattcatgggcatctgaaccggatattttaaacccttcgtccattaaaatttctgccagcccgctcatactgattccaccgatgccgacgaaatgaactgactgtggttttgtaaaatcaatctgatacatgttattttccacctttattctctatattctgcagcccctatatataatgtatatgccgtattgatgtccattgccgccgggcgcatttacccgttttccggcattacttttatttaacttcttttgatgggaattgtcaagattttgttagtgccgtcagaatatgatggttacagttcagccttctgctaaaccgtaacaaatgatgcacagaaacggcaaaaaaacgccgttgattgtggtgaatagtttacttttcatcacgtcgctccgcgcacagttcaccgtcatcaataaaaaggcccggaaaggcagtaaaccttttccgggccaattcggcttatcagttcagccgtctgtcatctggcagccgcatttccagcacatctgccaaataaaatatttttataccgttccagagctaagagcaggatattgcccagaactccgatagccagaatctcaccgattcccaccgtcaccatggcaaccggaattaaatccggcgagccatacgcaaagcggagaacccatggaatgatggcagtgttggccgctatcggcggcaggcatacaagccacttgttcccgcgcagcccataggaacctgctgccccgattaacgtcgccaggctgccaaacacgatatcgagcggcgctgccccgcagagcaggttggacagcaggcagccgataaacacgccgggcaccgctgccggtgtgaagaaaggcaggatgcacagtgcctcggcaatccggaactgcaccggtccgaagctgattggtgcgaataccagtgtcagcacggtataaatcgccgcgattactgcaccgtaagccacaaagtaaacggttttgttgtttttctctctcatattcagttgtctcctttagttttgttttacaagtggaaggtctcgaacacttgggttggttgtgcaggaatcccggcttgtatacggacgggaatactgcgaccttattgcagttgctactatatcatattaggaaatgaaacgcaagtatgagtctgcaattgtatataaaaagctgcggacacggaggagagtctgccgtgcccgcggattgttaccacacttatctatgtttgaataatcctgcaagcttctccatcgtctttgaaggcggcactgcctcctcccctgaatcgggggcatccctgattacatcctcatatacataatcccttgatacagtgcgcggccgtttcatcatatatttgataaaaccgacaagcatgatgacagcaagaaatgtaatcggcattccgcaaaaggactttacaatcttgattccttctatgcctcctgaaagtgtgaagaccagcgccactgccatgagcaggattccccagaagaacttaatgcctgccggaggttcctcggattcggaggcctctttcaaggacatgctggagagggttcccaccatcgagttagcctgggtaaccagggaaatagcgatgatcagcagcataaatgccttcatgattgtggacaggggcatattgccgaatacggcaagtgtcagggcttccgctccgcttgcctgataaatggagtagtaatcaattccctcgaaaaactgtccatgaagtacggttcctccaaaaatcgagaaccagacgaagccgaatacggccggcatcaaccaattgacgacaacgaactctctgagcgtcctgccatatcccatacggacaaagaacaaacccaacatcgggccgtacgccagccagtccacccaccagtacatatcccaccactgcggccacaattctccgttcgggaaaggtgaagtataggtcatcgcttccagaaggttgctcagataagcgcccaaagactgcgtcatcaggttgagcgtgtagccgatgggaccgaccagcagcataaatccgagtaatataaaatagaactgtgtatttttgtcacccagccaggtgattcccttctttaatccgctgataccagtagacatataggccgcaaacaatgcaatgcccaggctgatatatacggcagaactgggttgtattcccgttgccagattcactccctgggacagttggagtactccgtacccgagtccgcccgacacagcgccaacaagtgcaaatacagtaagcacatcgactgccagcgcccatttgctcgtcaggaactttctgccgaaaacaggcaccaagccggagctgactttatacggcagcttcatgttgtggcagacatatgccaataccacgccgaaagccacacagcttgcataaggcgtcaatgtccagtgcaggaagacagtcctcatcccccagagaatcgcctcattgctgcctggtacatagccgaagctgggagccggctccatcgcaaagatcagaggttcggcagcccccagaatacgactcccgctccgattccggtcgtgagcgatacgccaaaccactgccaatagctcattttcggtttggcattcggtccgcccagcctgattcttcccaccggatgaaagattacgactgctacaaaaagaatgaaaaacagcattgccaggctgacgaaccaccccatattgtacatcataacctcgaacgcttttgtaagtgtggctataaagccagccgaatcgacaaaccctattacgactaaaaagataaaaataacccccggtattaaaataattggtgctctcaatgcatactttggcttcaatgatatcttctcctttcctgtccttccccaacactaattttacatgaatcaaattttataaatcaagtcccatttttacgtctttgttttagtccacttctaagtctagtctaattttagtcttgttataattcttgtttcagtcctgtctcaatagattcagtttcggctgacctccgttcctccgggtgcccgttagtgtatttacgcttctctcacggtatcccgatattttaatttgattgtaacgattttaagcatcctgaaatgtgcaggatctcgttatttttttaccattcctcaggtcttcctgatgcgccaggcggagcatcagttttcttctgtccatctgataaaggagcaggctcacaattgccgtgttaccatctgtgcagggaaatgtccaccaaacggcagaaagtccccaaaatgataacagccaggccaacggcgcaaacagtattacctggcgcaggattgtgaggaagatactttgcagttccaattttcggcggcggcaccggcaattcccatatcaagaccaaagataaaaaggggattcccgctgacggtcggtaaaatcgcagcgggaacatgggtggggaatatattaaatgtaactggcaagaggatcaagcctgggataaactttctggagataaattatccggataggttccgtgtctattctgcatccatataaggatatcggtaatcttccggcgggcagaagttttcttttaccgtctgcgggctcatccagcggatcatgttcaggatactgcctgccttatcgtttgtacctgagccgcgggcgccgccgaacggctgctggccgcacaaagccccagttggtttatcattgatacagaagtttccggcggagtgacgcagacgctcttccaaatctgtaatctgcacacggttttcactgaagacggctccggtcagggcgtaagcagaagaatttgcacagtgatccaccattgtgtcatactcgtcttctccgtatacatataccgttaacactggtccaaaaagctctttaatcatagttacataattcacgtttctggcctgaatcagagttggataaacaaaccatcccttgctgccgtcatagccgccgcaaagcacgtcggcatccggagattccttggctgcatctatgtagctggtaatctcctcgaacgcgtttttatcaataaccgctccgaagaaattagtaaagtctgcaatatctccaaccttaatcgtggcgatttcattcaaaagcttttccttaacctccggccatatcctctgaggaatatagcagcgggacaacgcagaacacttctgaccggagtactcgtaagctccgcggatcatagcggttacaagagcgtcgatgttagcgctttccgtggcaaagatgtagtcctttccgcctgtctcacctaccaatctcggatagctgcggtaattgctgatgttgtttccgatatttttccagatatctttaaatacttcggttgaaccggtaaaatggaaaccggacattcggtaatcactcagtacgtatttactgatgtcggagccgcgggacggaacaaagttgataacaccggccggcacaccggcttccacaaaagctttcatgatgtaatagctggccaggactgccgttgtagccggtttccaaaccacaacattacccattatagccggagcagccggtaagttgccgcagatagaagcgaaattgaatggcgtaacagcacagacaaaaccttcgagcggacgatacacaacacggttaaatacgcctggtgtgcatttcggctgctggctatacagattatcggcaaagtgaataccgtagcgtatcagatcgcacagttcatcgggtgcgtcgcattctgcttcccaggctgtcttgctctggccgagcataacagcggcagaaatgatgtagcggtatttaccttcaatcaaccctgcggctttttcaaagatagcaaagcgatgctcgcgcggaagcgcttcccactttgcttttgctgccattgcagcttccacggattctttcagcaatttttcgtctgcctggctgcactgtgccagaatcattgaatggttgtgcggcgctgccaccggtacgcgtttttcggtataaatctctttaccgtttatgatgaccggaatttcaattgtaagagcgctctggcgggcaagttcttttttcagttcttcccgttctttcattcccggagccatggagcatgcaggtacgttatcaggcattggtgcgtgaaaatgacaattcataagaaatcctccttaaataataattcttaatattgttttgatatctgttgtatggcttaattctatcatccggccgcctgaaaatctgtgcattttttcgctgtttttttgccgtttctctcctttggccatattactgtttacggtaaacttaacggcccctccagcactaccagggaattgattgtatccagacatgcgccgatttttgggtgatccagctgcctgacaaacaagataatctcatcagaataggtatcgcagtgattttcaatcgaaatttcaagtcccagttattactatataatagcaatttccgtaccaatctttttatatggcgtttatgagttgtttttatcgtttttatggggaaaattcatacccagaaagggaaatagaaataaaatgtgcataaaatgggtttgataactgcagatttttttgcatgcagaataatatagtttgcattcagagtaatgatgtggtgaaaaacattaaacgagttatttaggaggggacaaacggttgaggactgccaaacggcagtcctccctggttaaattccttccggactccttcctgaaatcagcgcctggacatcgattttatttcgcttaatccggtactggatattctgtctgctcattcccaatacacgggctgtctttgagatattcccattgttttcctttaacgtcttgcaaagcatccggtattccatgttgctcatgatattttccagtgaaagttctttactgcttttcagttcaatcggtatatccggagcctgtcctcccagaatatgttccggaatatattccaatatgatggtagatacgtcctccggcattatattcatcgcatactctatggcatgttggagttccctcacattaccgggccagtcgtaggaattgaaaacattcaaaacttccgcatctatgtctataacattcttaagaagtttccggttaaaattcaatatgaagcatttggccagaagcggtatatcttccatgcgttccctcagaggaggaatgttcaggttaaccactcccagacggtaaaataaatctcggcgcagcttattttcctccatagcctgatacggaggaacatttgtgttggaaaggaccctgacatccacacggatttcagagactccccccacatgacggaccattccgtcctgcagcacgcgcaacagcttagactgcaatgaaatattcattgagtttatctcatccagcaaaagtgtcccgtggttggcctgctcaaacaatccctctcttcgttccgccccggtataggcgcctttttctgttccgaaaagcagcgattccagaaggttttcgggaatagcagcacagttgattgcaagaaacgggccgtctgctcgctggctggcgttgtggatactctgcgcaagcagctccttgcctgtacccgtttccccatatatcattaccgaagaatccgattttgcgattctctggcatttcctgatcaggccgtccatggcagcgctgttatgtataatatcacggaaatgatatttagccgacaatcctctgttcttatcacttctcgcagctgcagaccggttcagaagctggctttgcaggtctattacctgtttgctcagtttgtcgatctgggaccagtcttccatgatactgaaacctccaagcagcgaatttttaactataaccggataattgttggacataatatccaccttttttccataacaggtggtataatgctgcctcagattcaggataggcagcttgctatggattaccctgggaatcaccagctctgtttcatcatccatcgtataaatactggatacatgctgtcccacaatattctgcggcagcagggaatccatcttgacggcagcatcgttgagcatgaaaactcggccggattcatcgcacagtataagcgcctcgctaatttggttgaccaccctcatcagcatatcatgacaggcatcgtttctggcatcgcgaaagactatcagtctcgtacccgcaggcagatcgcaaagctccggattcggacacaatgccagatattctccaaaatcaatgttaaagtaatctccgcccgcttctccgcaaaatgggggagccacctcccgaagcgacttccccggcagttcaccgccgccgtgcagcagtttgtcacccgattcattgacttctaaaatatcattattttccgaagccagaactgctcccaatccgcactgggaaagaaaaaacatcccctcctgatacgtcataagcactctcctctctgccttcagtgtaacatagtttccggcagtttaccagaatttataacgtccgtaacgttccggagtgtgaacagaatcgtttcggatacctaccactctgccggcggtcccggcatttcccatctggtatgaacgacatgcaggagttcatgggctttctcagaactgggtttttccaggtattcacggtacagcgcctgaatttctgggttttcatggctgaaacggattttattcgttttatccaggtagtacagacaggcgctccttgaagacgtgtcgtccgggttttccgtgaaggacggacggatgggctggccgcctcctcccacacagccgccgggacaagccattatttccacaaagtcataggcagcttccccacgccggattgaccgtatcagcctgcgggcggcacccaggctgttgacaactgcgcatctgactgtcattcctttgatatcaaactccagctctttgataagtccggcctcccgcactgctccaaggggcgcttgcgggcttatatcgggcttttctcctgtgagaatataataagcggatcgaagtgcagcctccgttactcccccactggtgccgaatatggcccctgcaccggtcgaagctccaaggagtgaatcaaactcacgttctggcaaaattggcacgttgatatgatcagccttgatcagacgacagatttcacgtgtggtcagcacataatccacatcgtgtcccgtacccgcgctgtccatgccgggaagcgtcatttccatctttttggcaatgcacggcatgattgagacacagacaatcttatcaggagccagccctgctttttctgcaaaatacgttttagctattgccccaaacatctgctgcggagatttagctgttgaaagctgatcaatcatttccggatactgtgatttcataaaacggacccagcccggacagcatgaggtgaacatcggccagttatatttttccctgtttttcagacgctccaggagttctgcgccttcctccataatagtcaaatccgcggaaaactccgtgtcaaacacatagtcaaagcccactgccttcaaggcagacaccaggcgtttcgtcgttgaaagcatcgggtcaaaatcaaattcttcccccaggccgcgcggacagccggcgctatctgggcgatcacaattttatccttgtcggccagaacgccctggacgctggtaattttagatacatcatcacgctcctggagagctgcggtcgggcaatgggtaatacactgtccacaaagcgcacagtcggaggcctttatctccctgttaaaagagacatccaccgtggtatgggaaccggtatttgatacatcccaaacccccagagtctgaaccttgtcgcagatctggatgcagcgcatacatttaatgcacttgccggcatcccgcaccagaggaaacgaggaagtccacctggccggagcatattcattcttatactgatccgcttcgagtatcagttctcccgccacctgctttaactcacaattctcattccgcacacaagccaggcagtttgtatgatgctgggagagaatcaattccacattggtccttctcgcttcccgcacccgtggtgaattggtgataatctccatcccctccttaaccttgttgttgcaggaagagataagctgctcatgtcctttgatttccacaacacagacacggcaggctcctatctcgttaatatttttcagatagcagagagtcggaattgagaatccgttatcacggcaggcatccagaatacgtgtgccctccggtacggtaaaaggccggctgttaatttttatagctatcattttatttactaccattctaatctacgtcctcctttgaaattcccgtaaccaaagtggtcacagcgcaggcagcgccgcgcctcctgcccggcttctttcaggctcatgccgcattccgctatctcaaaatcacatttccttccggatgcctccctctccttcatgtttacgcgtccgtacggtgtatgatcggatagctccggctccggaatctccacatccgacctgatcttgtgatcatatcccaggtacgcgtctatattggctgccgcaaccttgccggatgctatggcccgtatcactgtggcgggacctgtcgaacagtcccctccggaaaatactccgtccataccacttacagccccgttatcctgggtgctgattacaccgcgcctggccccgattccgctctcctcaaaataccggctttcaattccctggcctacggcagcaataattatatcacactcaattcttacggatgcttcccctgagggaacaggcgtcggcctgccgtccctgactggtcccggtatctgggatgatgcccagagcgcggccactttgccatcctcatccgactcgatataatccggggcaaaaagctccataacctctgcaccttccgcgatggcagattctatctcctcctgaagagccgtcatatcggcttttctccttcggtagacaacggtcgtcttctccgctcccaggcggatggatgtacgggtcacatccattgcaacatttcctcccccgactacgcagatacgttttccatttagttcaggggcatagccgtcaccgattcctcttaacagttcaactgccgatatcaccccggctgcatcctccccttcaatcccaatctttttatcggcatgggcaccaattgcaatataaaccgcatcatattccctgcgcagttcttctaccggcatttctccttttccgccgcccactgccgtctccaggcgaacctcgactccggtttccagtatagctcggatatcgtcctgaagacgttccctgggaagacggtagctcggaatgccgtaacgcagcatccctcccagcttcttccgcttctcaaaaacagttgtccggtgtcccatcagctgcaggtaaaaagccgcactgagcccgctgggacctccgccgataaccgcaatctttttgccggtctttggcgcacaggcgggtggagccacatatcctgccatatccacagccacacgctttaatccacggatattgacggcgctgtccagcatattccggcggcatctggattcgcagggatgttcgcataccaaggcacaggcagtcggaaatggattatccttccgtatcaggcggacggcgtcgccgtagcggccggaagccgtcagggctatgtaaccgggcacatccacgcctgccggacagagggccatacagggaatcggctgccccagatgatagagacagcggttatgtaaaacatgttccctgaaatcctccctgaacccctctagcgctttcagcaccatatgagcagtaccggagccgatcgtgcaatcggccgtacccgcaatgaccctggccgtcctttccatcagagaaagagttgccatcgtccctcttcccttcagtatatcatcaaaaagattgcacatctgccccagaccgacacggcacggaacacactttccgcaagtctgggcatggcacaatttcaaaaaagaagctgtcaaatccacgggacattggcctggtggtcctgcaagaattcttctctccatatccccgtacagctcctccgtaactttcccgacatcgctgccggatggaagtttaagtctgttcattgttaaatccatgtagttctccattttcctgttctctctttccggataaacaaacttccggcgcaaataccccgttaacataatcacatctgccatattatctgcgccggctgctttatcataacaattctgtcaggtctgcgcacttgctgcgctgaccgtgcgaaaaggcggcagcagcaggcattcagctcattacgatgcaattttgattagccgaatgctgtaacagttcatgatctctgaactgttacgatttatcctgtcttcttaaaacaggggcactcccggtattcctttggtgtcatacccgtcaggctgtggaaggcgcgcgtcagtgtggaattgctgctgtagcccaccatggccgcaacttccataatattaaagttagtctgcgtcagaagttccttggccttgctgattctgacatatctcaggtacaggctgggcgggaatcccgtctgcgatttaaaccagtcattataataggtaacattataattttccatttcggccagttgtgttactgtaatcggctcatcgtaatggtcgctgatatagcgcatggacgcagtggaacagctctccaggagtttattataaaagtagtcatagagatatctgaccgacttgctgtcgggattttcctgaagctcctcttgaatcatctctaccagccttgtaatctgatcacggcaaggtatgatgagagggtacgtcagcagaccgctgtctttcttctccaggacatcccgggaaatattgatgacaagcagactgctgtggaaatgacaccggtgcatcatatcaggagggataaaacacagctcttttgatgtaacctcatactcaaggttcccaatccagatacgaagagtctcccgtaaagggaccagaatctgcggatagtcatgtacatgctggccgcagcattcattataaatcgaaaactgaaatgtgttccccatattacgcctcctgttcttacattataaaaagtatttgtttcgtgcattcacacatcggctatttaacggccgcctccaactccatcctgagcagagccggttccggtttttcctagactgtttttctgtcaccgtcgttccaacagatgaatagaggatatagtccttctcccttaactgtgccgattgcggggcacaggggtctgccttaccttgattataattcgcattctacataacggcgaactatatcacggcactccagcatgtgctcctccgacggagatttaagttccggcaaccggtactctcttcccagctttctataagtatctacgcccaggcgatggtacggtaataattgaacatgtatcaggtgcttcagtctgctgcagaattctccgattccggccagctccgcttcattgtcattaattcccggaataacaggggtgcggatgataagcccgaacggatcggttatttcatttgactttattaaattttgatggatcagccggttgcctatgccgcagtatttgcggtgcaacgcgttgtccacaagcttaaaatctacaaatgccgtattgacatatggcaggatggatgcggcattttcccaggaagaacaaagcgacgtctcaatggcggtgctgatacactcatttctgcacacccggagaatcgaacgagcaaagtctggctgagcaaggatttcccctcctgataaggtcatccctcctccggagtggaaataaaaggcgctgtccttgcgtatttccttcataacttcctccaccgtcatatatgttccataagtattaccctccgcatgctcaatctcaaaggattggctctcgggagtggaacaccaccagcaatttaagggacagccctttaaaaatacaaccgtcctgattccgtgaccgtcatggatagaacagcgttctgttcttagtacgagtccccgctcagcattactttgctctcttctcaccattggttctctcctttataatcagcggcctccccagcatccaatctcggttctgccgataatctcatcctggacttctttgccaagctcgacaaagaatgcggtataacctgccacacgtaccagcagatctttgtgtttttccggatgtgcctgcgcatctatcagtgtatcacggtctaccacgttaaactgcgcatggtacacatcaagcgtacacagtgttttcaacagattcatcaaattggcaatgcctgcctccccggcgatgatggacggctccagtttcatattcaactgcgtcccctgagtataacgggcgtgcggtatatggctgaccgatttcagaagcgctgtaggtccattagtgtcggttcctccggttgccccgattccatcggtcagaggtgtccaggcatatcggccggacggcagggcgcctacccatttcccgattggcgtattgcctgacacggggagcataccggtcgtcatcttaccaaatttagtatcatatttttcaaactgatctacgacataggtgaaaacttctcccacaatccagtctgcacgctcgtcgtcgttgccgtatttcggtgcatccatgcacattttccggatatcctcatatccttcaaaattggcttcaagagcctgacagagctgctccatagtaatctttttctcgtcatacacgagattgcggacagccgccagggaattgatgatgtctgcctggccgacggtgataactccgccgccgcagttatatttggctcctcccatactgtagtcgacagctttttccatacaatccggataggtcagggacagacagggaacaggccggtaattcatgcttaagtagtcgagaagctgattgccggaagcaaccacgtcaacaaagtaacggatatgggcttttacagcctcgaagaaatcatcaaatgtcttgaaactcccgggatccccggtggatacggacacacgttttccggtctttcggctgataccgtcattcagtgccatctcaataataccgcccatattgatatccgccatgtcggtatactgtttcatgcgtccgctcaggttagtttccacacagccgcacgggttccagtcccaagcttcacttagcggcacccctttatttaacagcatgcggattcccgcatcatcgtgatatacagccggcatactgatccccatcctgatgccttcggctgccatgcgcaggaaggaatcaggatttttggctatattatagcgcacggacaggtttggctcggcgaaccttacatccattgttgcctggataacctgataggacaacgggttaacggcatcatttccaaaccggtcgattcctcccggagtgacctgaatcgtcgtacagtagcctgcggcaaattccgccgtaacctcatcctggaacaggctcagctcggcgatcttaatccacatgcagtccagaagctcctgggcatcatcctctgtcattacgccgttttcaatatccgctttatagtaaggatacagatactggtcgatacgtccaaggttgtaggacgaggcgttctgctccatgtaaatggcatattcatacgtcagtacactctgaagagcctcgtaaaagctgcgggcaggatactctggtacacggcggcatacatctgcaattttcagcagctctatcctgcgcccttcgtccctgcattcctccgccatttcttctgccagatcggcgtgacggtttgctatggtgataatgccttcacatacaattagttctgactttaagaaaaacatcttctccaaatctcccacatgggaatcatccagcttctccagcgcttcctgcgcttcttttcggattcccgagattcccagtgtcaacaggcgttcccagcccggagtcgtctcaccgtatccacggaccgctttccggtctatatagatcatgccgttatcacgcagtgtctccatatcttcgggagccatagccctccagcggtccagcatacatttttctttccagtaatcggaaacttcttctttgaataccttctttccctcttcactgaggtagaagggatcaaattttcttgtactgatggtatcaagttcccgatccaatatggagcaggagctgtccgcacacaggataccgcatcgcggcttaaatccggcaccgcccaccagaagctcataatcctgtatgtaaatattctttttacggcactgattacggaaaccgttggctttctgcaggatccatggttttccctcgtactctttaaaaccttccgtcaggtattttgcgttatagacatccatatccacccttgtgtcaaggaattgctttctcagtgcctcaatacgttccatgtatttttttgccattcaaattacctcctcttttctattcacattcaaatattccggtaataaccgtccccactttcaaaaaataatttgtcagacgataacctgcacgctccgcgtacaggtcaccgccatcaatcatcccgcccggcagaaatgatattttcgccaggcggcgctgccagacgggatgccgcgtaattatctgttataaataccttcgttcaggtaagaaagaagctcttccttcggcatattgtcgataccgaggtaggccagattatacttactggtttcaaagaaactcttcttatgcattgagcctgccagtacaatcattgaatcgataaccggagtcggcactccgtactgtacgcccaaatcatgatagattttgcagcccaccgggacatcctcggtcaggtaacggtggttaatgctgttagggcctgtatttccttcatcggacggctggtctaacgggaagattacattatcttttccgtccttatcgagtcccatatattcctgcgtcaggacactccggcgggagaaaaaggattcatatgcatactgcggcgttcccaccccgatctcttttgccagcgccttttcttcctcgaagaactggtactgcacctcacagatggacgggcatagtccatggcagtacatggagtagctgttcttgtcatagccgccgaagatgactccccagttctccatcgtggacactccgaggattgtcgccggaacgtggataaccgggttgatgttggcaaaaccggtatccagaaccgtgttgcccgcctccggcccgtttccgtatgtaacggcatcgatacacggcagatatctggaggattccataaaggcatcgatatccgacatcggcagagacgctccccgcagggtgatggctcggtatttcacccccacgtgggggaaggtgaacttcccaacggattcgatacgcgttccgtaaggagcggaggaccatccgcctacgatgacctgcttggtacaccccatctcacgcatcattttccggagaagcagggtaccgtagttatcggtaaagatatggatgacctgaccgtcctcgagatgaggaatcagctctcggaaaaacggctcatgtgccatggctggcgctgcaatcacaatcaggccggcgccctttaccaccttgcccatgtcactgcttaccatatccaggtaggctctgccggagcgctcaaagcagtagaggttacgctggacgccgtccagcaggatgcctgtcttctccaggttggcaagcgtgttcttggcaaacggcatcatgtcataaagacggacctcttttcctgccagcttcatatcggccgcacaggattttcccacagcaccgccgcccaataccgcgatcggcatttccttcagatactccatagacactttcttcgtcataataatttcctccttaagatttctcttatctgtccatatagctgttccattcctatgtttttagaacaccatggattttatttttgtgtctttcgcctaaataatcagcaataaacgtgccagtttttaacaaaacaactgtatatttgtttttaattttacaaatcccctgtttacaagctttttcctttatttctgcaacacacttctgataaataaatgagataggagaaaaaaggcagacttcatccgccaaaaagtttgcatgttttttgcagtttttttgcagcatgcaaaaaagtttgcacggctgctcttgttaaaatatttcttgtcttttttctttcggaaagttataattaattacagtagcaatcaggcagcacgaactgttactcattacacaaatcaatacggccatcacggctgtatacaattgattctgcagcatctgtatggatcaagaccggcaaattctgccatagttcagcacaaaacaccaatatggcaggagaaaaacggctcctgtcgtatacgagaggagtcaggaatggcaaacgagaggtgaaggcacagtattctatccggaacattgaaaaccattcggttgttctcgatatcctggctgaggatacaaggggaaagctgataaatattgaaatgctgatacaggatgacggagatcaccagaggagggtgagatactatcactccagcattgatatgagctatcatgagaaaggcgttccttatgaagcgcttcctgatatctatcttatctttatcacaaaacgggatttttttaagtatcgttccggaatctactatgtggaacgcatcttaaaagatatcggagccactgttgataacggagtccacgaaatatatgcaaatttggaatgtccctgcgataatgaacaaattgatgaattactatcttatatgaagcatacagacagccattaccagacggacatcttcccaaatgtggtaagaaaagtaaggttctttaaagaaaaagaggaggggatcgaaagtatgtgtaaaatattggaagaagaacggcgtgaaggcagaaaggaaggcagcgaccgtattaacgagctgaaccggcggctgctgaaggacggcagagaagtggatattctgaaatcattgaaggaaccgggctatcaggagaggttgttgatggaatataatctgtaaaaaccggattttcactgccacccggaaaaacacccgacagttaaacaggaaagccgtgtctaactgtcaggtgcccgtcatagccccatatctttaaaccaggatattcataaacaaagtcagcagtaaaccatttaccacgtcaataattactgaaccaaccccaggtaccacaaaaaatgcgatgtccgacggtccccatttctttgtaaacgcctgcatgttggagactccgtttggcattgcaccaagcccgaatccgcagcagccggtagacataacagcggcatcataatcttttcccagaatgcggtaaccgatgaaaatcataaacacagccataaatgccacctgggtcgccagggttacaatcattgggagggctaagtcggccagctgccataatttcaacgacatcagcgccatcgatacaaatatagtcaggctgatattgccgatacagtcaatttcagcaagaggagtctcaaactttcccgtataggtactgatatttcgaagcactaccccattaacattccgcctacataagagggaaacgtaatccccaccatcttgagtagaataaatataatcgttccgatacccattgaaataataatctgatttgatgctgagaacatatttttagcgctgagcggaagttcctgctccgtttccgccgctcttccggctctttctttctgacgtgcagcagcaacctcctcgagccggttctttctgacaagaatatttcccacagggcctcctatcagcccgccggacaccaggccaaaggttgcggccgccataccaaccgtcatagcgccttcacagccgtaaagttcttcaaacattggtgcgaaagagccggctgtgccatggccgcctgtcattgcagcggaacctgtacataaaccgagaagcggattgagatcaaacatctttgcataacccacaccaattatattttggaatatcaccagcaggaaaacgataatcgcgaactgtattcccctcataccatatttataaagcactttcaaatcacaggtgaatccgaccgccgtaaagaaaacagtcataaaaacattttgaagcgttgtatctaattccaggacacacaggccgctgctatagcctaataaagttaagattgaaaaaataatcccccctactaccggatccggtatgcatagcttctccagtattttgatatgttttttcacaaagctccccataaagagaaccagaactgcaacagcgagtgtttgaatgatgtctaatttaactaccataaactttccccttccccagtgtcagccggagcaaagcaggaataagctccctgcccgctcctgcatcttttcttatcagcggttatatatcccttcattcaggtaagcaagaagctcttccttcggcatattgtcgataccgaggtaggccagattatacttgctggtttcaaagaaactcttcttatgcatagagcctgccagtacaatcattgaatcgataaccggggtcggcactccgtactgtacgcccaaatcatgatagattttgcagcccaccgggacgtcctcggtcaggtaacggtggttaatgctgttagggcctgtatttccttcatcggacggctggtctaacgggaagattacattatcttttccgtccttatcgagtcccatatattcctgcgtcaggacactccggcgggagaaaaaggattcatatgcatactgcggcgttcccaccccgatctcttttgccagcgccttttcttcctcgaagaactggtactgcacctcacagatggacgggcatagtccatggcagtacatggagtagctgttcttgtcatagccgccgaagatgactccccagttctccatcgtggacactccgaggattgtcgccggaacgtggataaccgggttgatgttggcaaaaccggtatccagaaccgtgttgcccgcctccggcccgtttccgtatgtaacggcatcgatacacggcagatatctggaggattccataaaggcatcgatatccgacatcggcagagacgctccccgcagggtgatggctcggtatttcacccccacgtgggggaaggtgaacttcccaacggattcgatacgcgttccgtaaggagcggaggaccatccgcctacgatgacctgcttggtacaccccatctcacgcatcattttccggagaagcagggtaccgtagttatcggtaaagatatggatgacctgaccgtcctcgagatgaggaatcagctctcggaaaaacggctcatgtgccatggctggcgctgcaatcacaatcaggccggcgccctttaccaccttgcccatgtcactgcttaccatatccaggtaggctctgccggagcgctcaaagcagtagaggttacgctggacgccgtccagcaggatgcctgtcttctccaggttggcaagcgtgttcttggcaaacggcatcatgtcataaagacggacctcttttcctgccagcttcatatcggccgcacaggattttcccacagcaccgccgcccaataccgcgattggcatatcctttaaatactccatattagccataatttaaaattcctccttataggtttttccccggagtgtactttgatttccagaaatgctccggtacatatagtttgtaaaccgtttacacccttatcttaatatgctattatggattcgtccaacgaagagttttgatggaaattatcaaattacttgatgggagaatattatgaatatacgttcgctgcaaacctttatccgcgtcgtggaattaaaaagctttacgaaagccgcatgtgagctcaactatgtccagtcaaccgtaacaatgcagatacagcagcttgaaaaggaactgggctatcctctttttgacagaatcggcaaaaagatagctctcacttcctacggtgaaaatttctttatctacgcaaacgaagttttgcaaatcatgcagcgggttaataatgtggggaaaaatccggaagaaatgaagggcactttgagaatagggctcctggaatctctgctgtccggcaccacacagcatattttccctctgtttaaagcccattataaaaatattgaagtccatttaaaaatgggacagctctatgaactgctgcctctgctccggcagggacagttagatatgctttatatatccggggagctgaatatggaccccgacttccattgctgttataaacgaaaagaaaatctggtctttatctcagccccggatcatccgctggccggcgaacatggcgtatctctcgaaaatgtgctgagttatccttttattgtaacagaactttcagggacctgttatggaagattaaaccagctggccttttctcataatctgtcgctgcagcatccgttaatcgttgacagcactatcgcaattgcagaactcgtcagccggggcatgggaattgcgtttttaccagaatattccgtctcggactatataaagcagcagcgccttgcccagatcagcgtaaacatccctcctcaaatctactatagccagatcctccattgtaaagataaatggatcccaccatttatgaatgaatggatttctcttatacatgaataccggccggaacgctgaaaagtaaaaaacacctcccggaacagctgctgacgtaacaaaatatgtcttctttctgatgtaattttactaacatgctttaaagcgttaatttttagtagtttaatgcataaaactcttgactatttggcaatctgcatttatactgtaaacaatatttaaaaaactattgttttaaatcaaatttaggagaagattgccatgaaaaacatcgtaaaaatcagaaacgttgtattcggcgaaggaattccaaaaatctgtattcctctcaccgatgcaaacatcgaggaacttagtaaatccgttaatgaattaaagagcgcaccttttgatatggttgagtggcgcgcagacttttttaacgatatcgaagatccgcaaaaacgatttcaggcaatgtcctttctccgggagcagcttggcaacacaccaatcctttttaccgccagaaccagcgtcgaaggcggcaagttagatattgacacggagggccatgtaaaactgctcacttccgtcatagataccggactgatggatttagttgacgtggaactgtccagaggcgaagatgccatgaagacgataagagacgcggcgcataaagcagggatgcatattatcggttccctccatgactttgcttccactccgtctaaggagcggattgtatatcatctctgtcagatgcagaaactcggcgcggatatcgtcaagtatgccgttacccctcagtgcgccagagatgtactgactctgcttgacgccaccctcacgatgcaggaggagcataatgaaactcctgtgatcaccatgtccatgggcggacagggcgcagtcagccgggtatgcggcagcgtgttcggctcctccattacattcggaacggcaggtaattcttctgcaccgggccagctccccgcagacttactttcgacatttatcaataacttataaatagaacttgatcgcataaggcatccgcgaaatcggatgccttatgcgttttatgtatgatccaccagaaacaggccacagagctgtccgccgccctgtggcctgtttctattaatcgttctttcattcatcggcggcgtaaaacacgtgagggaggagttttcacgttactgtttacggcttgccgttttttggcatggtgtgaacagtaacgttttcaccgcctgccggcccattccaggcggaccggcattttataaattcacgatctggctaatactgtttaacgtaaactatcactatcaatctaaggagttttgatactacaaatttaagtctgaacatttttcccggctattattcttcgtccataccaggtttaaagaattcgccgaacagctcttcattggacggcatatcttccggaagaggacgtgctacccatgttgtgttcatgtagtgctttaatgcaatgttctcggaaacgatatttccgccccatgttccgcagcccatggaagatgtcggaggcattccgtttgtagcggaaccggagttgcccttgttgtttggctggcggaccatgatacgggatacaggtgcagccatgccgagtctgtggatatgctcatcatcaaaggagtagataccacaggagtggccttttccgcctacgttgaagatagcctgcatcatggtaagcgcgttctcgaattcaccttcatatttgaagaggcttaacagagttgtcagcttctcgctggagaagaagaactctttaccgatttcattgattccgccgcctgttactgcgatgaatttgcggtcttccggaatctcaaagcctgctgtgagagccagtttctgagggctgatagcaacggtctgcggaagacggtggcctgtctcatcccacataacctttttaagcatctctgcctcttcctcatttgccaggtaagcgccttctgcttccagagcttttacgaagtcgtcatagatggactcgtggataaccaggtttccgtcacaggagcagccggaaccgaagtcggaagtcttggaaatacgtgtgttgcttgcagcttctctctgacgctccggtgtgttacaggtatcgtcgatgataactgttgcatttcctgcgcctgaaccgtatgccggcacacctgcggagtaagcagatttaaccattggacggccgcctgtagcgataatcaggtctgcacgtttcatcagctcattggtcagggagatggacggctctttgattccctggatgatatcagccggtgcgccttcacggaccagaacttcgcggatgatatcaatacatttatttgttacaacttttgcacgtggatgcggggagcagatcattacgtctcttgccttgatagcgtagataatctggcctgccggtgttaaacatgggtttgtagtaggaaccagggaagcgataacgccgactggtttagcatacttaacaagacctttttccggattttcttcaatgatgccgacactcttgttgcgcagacagtctctcaggattaatttaattttgttgcgtttgtttctctttgttactttgtcgccgagacctgtctcatcaactgcctcgtcacaaattggcgcccatactttcatatcgcatactgcggcggcaactgcctgacaaaggcggtcaaccgtttcctggtcatatgtagcgataatgtctgcagctacgcgtgcgcgcgctaccatctcttcgatcatctggatctgctctggtgttacttctttagccataacaacatctctcctttacattatatggtttattctgtacctgtcctttcggtaatttcagtataagggaacagaaggtaaaagtctaataccagaattctctcgtttttatagagagattctatggttactgttcgcacggcagcacgcccctttttggcggggaatctgcgcattttttgtgccgaacgtgcgaaaaggtagtggccgcaggtattcggctcatcgcacagcgattttaattagccgaatgccgtaacagttcatgctgtctgaactgttacaaattatcgcctgaagacagccagatacgaattttaacctcgattccctccgcatccaggccgtactttttaagaagctcctgagccggtcctgattctccaaatacatcacggataccgattttatgcaccggtaccgggtaattctcggagagcacgtcggcgacggcgcttcccagtcccccaatgacggaatgttcctccaccgtgacaaccttcccggttctcttagccgcctgtatcagaagctcttcatcgatcggcttgattgtatggatattgattacaccggcgctgattccgtcacgctccagagcccgggccgcgtcaagacatgccggaacgcacaggcccgttgatacgatggtcaagtcggttccttcccgcagtgtgataccctttcccagttcaaaatggtaatcatccgtatcattgatgacgggaaccggcagccggccgaatctcagatacacaggtccgtcatgctcataagccgccttcaccgcagctttggcctccacgtcatcggacggacagatcacagtcattcccggtatcgtccgcatcagcgctatatcctcgttgcactggtgggtggctccgtcctctcccacggaaatcccggcatgggtcgccgcaatcttaacattgagatgagggtaacccacagaattccgcacctgttcaaaggccctccctgctgcaaacatggcaaaggagctggcaaacggtacctttcccgatgccgccagaccggctgcaatcccaatcatattacactccgcaatcccgcagtcgatatgacgttccggaaacaccccccggaaaatggctgttttggttgcctccgccagatcggcgtcaagcaccaccagattctcatgtgttttacccagttccgccagggcattgccgtagctttccctggtcgcaattttcttattttccatttgcgttctcctccttcccggcagctgcggcagactgcttctctactgttttttcttcctcttccagcatctcgtcaatcgccgtgagatcatccatggcccggcagtattcctcgtcattcggcgctttaccatgccaggacgccttgtcttccataaaggagattcctttcccctttatagtctccgcaatgatggcggttggttttcctttgactttggccgcttccaggaacgcctcatgaagctgcgccatatcgtttccgtcttccacacaaatcacgtggaaattaaacgccttgaatttttcgtctatcgggtatgcggagcatacctcatcaatagagccgtcaatctgcagattgttattgtccacgatcaccaccagattatccagctcccggtaacctgcaaacatggccgcctcccagacctggccttcctgcaactccccgtctccaagaagcgcgtatacgcggtacgccgcaccgtccatctttgccgccagggccatcccgaccgctgccgagatcccctgccccagagagccgctggacatatccacgcctttgatatgtttcatatcaggatgcccctgaaggtaagaaccgatttggcgcagcgtgagcaaatccttcttgggaaaatacccccgctctgccagaacagcgtacagtcccggcgcattatggccctttgataatacaaagcgatcccggccttccatatccggcctggatggatcgatattcatttcttcaaaatacagatatgtaaaaatatcagcagcggagagtgaaccgccgggatggccggatttcgccgcatgcacggcggtcagaattcctctgcggacttcattggccttcttttttaattccaggatttccattataacctcttttccggcaatcaagattgggcgaacgcccgctgcgggccgcataagcggcggcatctcattgcctttcatttaaatttgcctgttaatttgaattcgggcctcctgccgttatccggctgaaggcccgtacctgctaattgttactattctccaaataccgccaggtaatctttcctgaacttgtcaattccctcatccgtcaggggatgtctgaccatctgcatcagaaccttataaggcacagtggcgatatcggcacccgccttcgcgcaatccgtgatatgcagcggatgtcttgtcgaggcacagatgatttccgtcgtgatttccggataattgtcgaaaatctgtacaatatcacggatcagctctgttccgtccgtggagatatcatccagtcttccgagaaacggggacacataggacgcgcccgccctggctgccagaagagcctggtttgccgtaaaaaccagcgttacgttcgttttgatcccttctgctgaaagtattttcaccgctttcagaccttccgccgtcatcggaatcttgacgaccatgttcgggtggatagccgcaatctcacggccctccgcaaccatatcctccgctttttccgtagtggccttaacttccccggataccgggccgtccactatctctgtaatctcttttataacctcattgaaattgcggccttcctttgcaatcagtgagggattggtcgtcactccgcagataatccccatggcgccggcctctctgatttcatccacattggccgtgtcaataaaaaatttcattgtcttcctcctctacaacagcccattggccgtaaggtaacgtttggccgtatcaaggcagcgcgcggcatgagccagcttgccccctgcttctatttcagcggcattgggaagttcaatcgaataataaggaatttccgctatcccatgcagcattccggcaatatcaattcccccttctccgacgtaaagccgggccgaacgggccacacccgccatatcagggtgatcgtccggaggaatccaggccggaccgtcgcagagatggacaaagccgaatttttctgccggaaccttcttaagcatctcctgagtcactcctgcccggtgtgcatgaagcgtatctaccatgagccttaaatttggccggtttacctgatccattacctccaaagattcctccagtgtacggacattggcaaatgccataaactccaggttaaccagcaaattatatttctgtgccatatcacaaattgtctcaagctgggccagggaatactccctgtctgggctccatacgcttgatatcacatagcgggctcccagctctgccgccttttcaaaatctgcctcataagccaatacgtcaattccgtctccaaccctggccagctcgatatccagaagtttaacgccggtacggttaagagccgacttcacattttgatatatcaccggattcgccagacgaaaatcaggctctccgggcagcttcatggatatgggccgcaggctgactccctcatagccgcagcgggctgcgatttcaatctgatcagccggatgggttcccggtacggtcagataggcaagtgaaaacattttttccatcattaacctcctgataaccaggagtccgtcttccgggtttcgtcaaacggaactttaagtataggaaacccggaatacgaacttctgtgtttaatttaagcagccgtcgtgtgatttggaatggcttggagcaacgtaacggccattttcctttttcacaagtttaccctcttttacgagtgcgtttggtgtataaatatcattgatattccagcagccgggtgtcggtacgacgatattttccatcggagcttcaaccaggaacggacgtccctctttgttggcggcaatagccttctccaaagcaggtttgaactcttcggccgaattaacacagatggactcgattccataggattttgcaacatccgcccagcagatggtgtaacgctctccgtccggtttatagaataccgtgccgaatttcgtcttatagtttgcattttcaaggcctgcgatggttccgaatgcggagttgttcattacgacccaggtacaggcaatgccatgctctacggccgtcgccagacaggacggattaatgccgaagccgccgtctcccgtcaggttgataacaattttgtccggtgcagcaaccttgccgccaagaactgcggaaggtccgaatcccatcgtagcaagaccggaagagtgatgaatggttcccggaatggtgatgtcaaattcctgtgcaacgccattcttgttccagcctacatctgtaaagattactgcatcctccgggattacttctttgacatccttgagaatccgctgaggcgtcatcgggaaacggctgtcgcttgaaatcgcagcgttggactgtttgaagtctgctttggctcttgcgattctggcacgtaattcaggattatttctaccctccggacaaagctttttcacttcctcaagaatctgtcccaggccaatcttcaggtctcccattgcgccgatttccaccggatagttgcggccgatctccatcgggtcaatgtcaatctgaaggaaggtcgtcttatccgggtcaaatgtaacgccctgataccagcttgagctgtctgcctcgccgaatcttgttcccagtcccaggattacatcggcatttgttgtaagggagtgtgtgaattccagtccccagaaaccggtctgtccaatcatcagcgggtgcaggtcggaaagacagccctgtccggccagtgtacgggacaccgggatatcgagatattccgccaaagcggccagttcctctgacgcctgtgacagcagaatgcctccgccggcgtggagaaccgggtttttggcccgggccagtctttttgcaatggcttttgccgctgccggatcaagagccggacgcatggttacaaggtttcctttatgtgtgcgcgcccacaggtcttcatccatttctctcgagaacatatccatcggaacatccacaaggaccggtcccggacggccggattcagccagacggaacgccttgtcgagaatgtcggggaatgcctcaacatcgtctactctccatgctcttttcactaccggctccagaagtttgtactggtcgccgtcagcgtgcatctgcacttcctggtgcggatgacggccatagtaatagctcggaacgtcaccggcaatcacaaccataggaatggaatccagtgaagcgttggcaacacctgtaattacattggtaaggcctggtcccaggtggcacattactacggacgccttatgggttacacgggcatagccgtcggctgcggtggaggcaacgctctcgtgcctcgttcctatgtattcgattttttcactgcgggacaaagcgtccagcattccgattacggtatgaccgcaaaggccgaataatttggtaacgcctctgcgctccagataatctactaataaatcagataccaatttcttgctcattttgatttcctccgttattcctggtttaatttcgttactgtacacacggtaatgttccgcaaggtgttttctattcattggctgccgcaatctcattcagcttatcagctactgcgctgtaaccggaaaagaaactgcagagtaaaggtgtctttatgtcttcaaggtcaggcagcagtgccctcatggatacctgtgccataacaatggcgtcgtatcccattttgtcaagctctctgatgtttgccatcagaattcggttatgctcctccggatggccgtcctgcagcgccgcccatgccgcattttgcagatactgggtacactccatcttctttccctgctccgcgccaattttctcaattaaacgctggcttggccccagggtggtttccactgtggcaatcagggcgattttcgttcccagccggactgcctcctgcgccatcggaaggtccaccttcatgaccgggatgcctacttcctttgcataaatatcggctacttctcctacggttgaacaggagtttacaatcagatccgctcctgatatctccgctgccttagcatacagcgtcattctgtcaatgacggcctgggtcgggcctttggccgcgcggacatcactcagcagggtgctgtcggtgataaattccacttttacattggggactttcgctttaagaaacgcaattgtatcctcccttttggcaaaactggtctgtaatatgcatacatgcggtgctttcataagaaattcttcctttctgatgtgattgacactttaatagttactgttcacaggcgtctcccgcgaggtgtttttgtgcgcatttcgcacgaaaatcccgagttacacggcgcgaaacggtgtttttcgccgtttctgtgcatcgcgaagcatgttattgttcgcatcatgccgctttttggcggggtgtgaacagtaacctttaatggttccctgtctcccggctatttcttcctggccgtaagttcttttgcctttgccacgatggagtccacatccattccgtggtcacggtagagcagttccggatcacctgattcaccaaacttatcctgaacaccaatcctctgcatcggaaccggctcattttcaaccagcacttccgctactgccgaaccaagaccgcctaaaattgtatgatcctcaatcgtcatgatggctcctgtctctctggccgccttaattaccgcctcatgatccaacggttttatggtcgccatatcaagcactcttacaaggatgccctgttcttttaatatcttggctgcatccagcgcttttttcagcaaaatgccggatactatcatcgtcatatcggttccgtaatctactacggtatttgcttttccccattcgaaccggtaggttgccggatcatagatatcggctaccgggttcctgtggagcctcacatagagaggtcctttaaaatctactgcagcgtgtgccagggcttttgccgccactgcatcggcgggctgcaccacagtcatgttggggaaggagcgcataatcgccacatcctctatcgcggcgtgggtggctccgtctccgccgacctgcagccctgtatgtgtgccaatcacggtaacgttcaaattcggataacacacgaaagttctgacctgctcgcaggctctcatggatgcaaataccgcaaatgtcgcaagaaatactttattaccgcaggctgccagtccggctgctccgcccaccatgttctgctcggcgattccaaaggaaaattctctttccggaaaatcttttccgaacttttccaggccgcatgctttagtgtcggcgttgcagaccacaaaattctcattggtctttgctatctctatcagttcatggccgaatgccattcttgtcgcaagtgtttttgccatcacacaacacctccttcctcaatctctgcaatcgctttgacaagctgttcatcatccggcgcggctccatgccaggatgagtcatcctccataaaggaaactccttttcctttgacggtccgcatcagaatcacggttggacagcgcattgtctttgccgtatgcagggctgttaatatatctttcatgttatgtccgtttacttccactacccgccatccgaaggaacgccatttatctcccagcggttccaccgtcatgatgtcgtttacccagccattaatctggactccgttacaatccacaattgccaccaggtttttcaggttatggtggcttgccgccatggctgcctcccaaaccatgccttcctgtatctctccgtcccccagcatgacgtaggtcatataattctgatgatggagtctggccgacagggccatgccaacgccaaccgataaaccgttccccaatgaaccggccgacatatcgattcccggtactttattcatatccgggtgcccctggagaatggagtgatactgacgcagggtgttcaggagtgcggggtcgaagaatccccggcgcgccagcgatgcgtacagcaccgggcaggagtggcctttggagaggatgaacctgtcacggtccgcccactgcggctcctccggctttatattcattacgtgaaaatacagggctgtcaccatttctaccgctgacagagaaccacccggatgaccggcttttgccgaatggatcatggagatgatatcctgcctgatttggactgcctgtgtttccagacgttccacgtcacgctctgtaaaataattgcgattttccataattcaatcctttccctaaatattgccatatttatttcctgtactttgaagccgctcccgggttggcaggctaatcagttcagttcttgtttctgtactgatcttactacacctgtaaggaaagatccaattcatcttcctgacagttactatcagtaaaaatgataataagaaaaaacaacagcctgtcataatcccccagttgaacgctccccactccggcagcaaagcaatgcacatcccaaccgcaaataatactccgctgactgttcccattaccattgctgtaaaactgctcttttcataagatttcaccttacttttattatctcaacagttgtttgtttattatatttatactataataaaatcacagtcaaaaagcactccgcatcattatcatccgtgttggagtaatagcgccgcaggacttaaaaagtggggaggttttatgaatattaaaaacaaccggcggagacgggcatcaagagacgcgattgagaatacttttatcgaactgcttcagacaaaatcactgaacgaaataacggtctccgatatctgtaaaaaagccggattaaaccgaagtacattttacgccaattatatggatatctatcaattggcggatacaatacgggaaacactggaggataacctaaacgatttatatcggtctgaaattgccggcggctataacagcaatgattatctgcccctgttccgccatatcaaggaaaatcagcctttctacaatacctactttaaactgggctatgacaaccaatacaaaattttaaaatatgataccgatctggctcgggatcacttcggcaaccgttttattgattaccactgtgaatttttcaagagcggtatcactgcgattattaaacactggctttcaaacggatgcctggaaacaccggaggagataaacggaattctgatgagcgaataccgcggacgcaaaatggaggaaacctgatggaaatttatactatgaattatgttctggccgtagcagacctgggtaatttttccctggctgcccaagcctgccacgtgggacagccagctctgtcccagcagattgccaaactggaaagagagttgggcatcaccttgttttaccgcaattcacggggcgcgactctgaccgaggcgggtaaggagtttgtaatacgcgcccgggagatcatccgccgcaccgaagcactggaagcggaaatggccttctacgcaggcctccacaaaggcagtctgacacttgggattatcaccagtctgcaatgtatcgatttcggtgatatgctgtcctccttctgttataattacccggatatctcagtcaatatccttcaggacggcacacaccgcctggtggacctgctgctggaacgcaaaattgatctgggtttcttaaacaggcccctgactgaactgccgtccagcctggacttcgcaaagctgggagaagactactattccctggcggttcccagtctccatccgctggcaaaacggggtattgtgagcctgtcagagctgaaggatgaacactttatttttcatcagagcggccaggtggcatcggagctttgcctgaacgcctgccgcgacgccggtttcgaaccgaacatcgtctgccggtccggcagcccaaccaccggtctctatatggtccagggcgggctgggaatcgctttcctcccttccgaagaattcctctcccgttccctgaatggagtgacagaacttaaactggaggaacggattgtaaaagaggtaggcattgcgtggagaaaggactcgtcgtcaccgcttttggatgccgcagtgcagtttgctaaggggtgggttaaatagagatttaactgaggttgggaggacgcgtccggaacggaccatgtccggtgtggtgaggggctggctgagtcttccgtccccgtggataggttgtcgtggagggggaatccggccggaatgaattgctgcggggaccgtttgcactctttggagtgcgcatcggaatgctaagctcgaaaagacctcgctaagcaccggcggactcccatgtcccctccgcaattgattccgcctacttccccgggtcagtttttcgccggggacggaacactcaggcggaggttttcgacaccggacatggtccgttccgggcgctgattgtctccaaccttaaatggggagggccctgtcgcggccactacgtgtttccggaatgctgatatcaaatcttccgcaattatttaaaaaggcgcattgaaggcataccgtgtttcccgcatacggaagctcttagtggccgcgacaaggtccgccccgcacttaacgcgtgagacaatcagcggccgcaggccggcggacggggccgatacccccggcggagtctttcgtcccggcgaaaaccttaccttggggcggaggggaagataacgtctgcggatgccgttgaaatccatcgctgattagcgaggtcctgtcgagcttagcagcgcgatgcatttcacagagcgggagtgtgctccgcagacgttatcttcgcccgcagccccaaaccacgacaatctccccccgggacgaaagactcatataaacaccccaccaccccgtccgctggccgtaccggctgcgtcctcacctgcttaactaaatctccacataaaatagaaaacgggcaaagccatcccagctttacccattttctattacattattatgaactgaaaatcatctcactgccaattactttgcattatgcgatttcgcatggcttggcgccacgaatcttccattctcatctttaacaagtttaccctctttaacaagattattcgggctgaagatatcgttgatattccagcatcctggtgtaggaacaacgatgttttccatcggcgcttcaacgaggaacggtcttcccgccttattggcctcgattgctctctccagagccggtttgaattcatcggcggactcaacacagacagactcaacaccgtaagctttggccacatctgcccagcgtggtgtgtagctctcgccttccggcgtaaggaatacggtaccgaactttgtctggtaatttgcattttcaagtccggcaattgtaccgaatgcagagttgttcataacaacccatgtgcaggcgattccctgctctaccgccgtcgcaagacaggtcgggttaacgccaaagccgccgtcgcctgtgagagtcaggcagatcttgtcaggagccgcaacctttccgcccagtacggctgacgcgccgaagcccatggtagccagaccggatgaatggtggatcgttcccggaagcgtgatgtcgaactgctgcgcaacaccgttcttattccagcctacatcggtgaagattaccgcatcctccggaataacttccttgacatcttttaagatacgctgaggtgtcatcgggaaacggttgtcattggatatgtcaacattggttgctttgaaagcttcttttgcttttgcaatctctgctcttaattcagggttcttctttccttccggacaaatctttttgacctcttcgagaatctgtgcaagaccaatcttcaggtcgccgatagcgccgatctcaaccggatagttacggccgatttccattggatcaatgtcaatctgcaagaacgtggtgtgagccggatcgaatgttactccagggtaccagctggaactgtctgcctctgcaaaacgtgttccgagtccaaggattacatcggcttttgtcgtaattgaatgtgtaaattcaagtccccagaaaccggtctgtccaatcatcagcggatggcggtcggaaaggcatccctgtcccatcagtgtacgggaaaccggaatatcaaggaattctgcaagcgctgcaagctcttcggatgcctgggaaagcaggatacctccgccggcgtgaagcaccgggttctcagcctcaaccagtttctttgcgattgccttggcggcagccggatccagcgccggacgcatggtcagatggctgtctttgtaggtacgatcccacagataatcttccatctcacgtgagaacatatccatcggcatatcaatcaggacaggtcccggacggccggactcggcaagtcggaatgccttatccatgatgtcgggaagggcctccacatcgtccacgcgccatgctctttttacaaccggctcaagcattttatactgtgtcgcatcaccgtgcatgtttacttcctgatgaggatggcggccataataatagctgggaacatcacctgcaataacaaccatgggaatggaatcaaacgcggcgttggcaactcctgtcagtacgtttgtaagtccaggccccagatggcacataacaacagacgctttatgcgtgattcgtgcatatccgtcggctgcggttgatgccactgcctcgtgacggttggaaatgtatttaactttttcgctgcgggacaaagcgtccagcataccgattactgtatgtccgcaaaggccgaatacatatttgacgtcgcggcgttcaaggtaatctaccattaattcagaaaccagcttcttactcatagttcttcctccattatcaatctttcttatatatttatttatctttattttactgttcaagtaccatccgcgtaacagttcacgctgtctgaactgtcacccatctacaaatataacagctctttccggttacatcaggccatggtgttccatatattggtcgaacacctctccgctgcggatgacgtaatcacggaaatactttgctgccggagggatataccgctccttattccactgcagatacagcttacgctggggaatatcgttggcaatagggagaatctgcgtattatatggcgccccggaaagtggatatggtacaatagccaccccccgtctggctgcaaccattccatgaataatctggtcgctcaatgtctccataaccatattcggcctgactcccagctctttaaaaagctcatccagctgacttctcagctgtccgctggggtcaaatgcaatatagttttcgccgtcaagctcttttaagtccacacaccctttacctgccagccggtggccttccggcaccagcagcaccaggcggtgcgttcctatataggccgcctctatctgcggatgctccaattttgttgacaatatcaaatcaaccgcaccgtcaagcagcatgttgtaaattgctttccatccttcctggctgtactgaaactgtacacccagacggttggtctcagattgatagcgcaccatgagatccggtgcaaattgtgccattgacggaaaccctgccagggaaatgattccctcgttcgggtcgatatacccttttaaagtagtaatgccgtcctccagtgaatttattgtcctaataacatatggctggaatatttcaccatattttgtcaatttaatgttgcgcccctgacgttcaaagagctgaacccccaattcattttccagttctttgatggcatggctcaggttcgactgacttacatgcagcttttctgctgccctggtataatgttcaagttctgcaattgtgttaaaatagtacagccactgcaaattcatatgtaatcctcctccaggttttaaatgcggtaaattttcccttcactattatctattagttctcaggaaaccgcaacctgtttaggcgttggaggattcttttgccgtcagcgccttatccatttggcgcgcctcccatgtattaagaaccacgtcaagagaaatcagcatcaatccaatgaaaaatgcaggggtaaaggtttctcccaaaagccaggctcctaaaagagctgcaaaagcaggctgtaatgggtaaaacagggaacaggtgctggcaggcagcatggacagacattttgtccaggtatactgcgccacaccggagcccgcaaatccaagatacaggattattgccactccaagcggagtaatcgtaaccggccgggtacaaacagtcactatacctaccggtatatgaaaaatcaagctgatggccatactgtaggtggtcaccagtactgccggatactttgccgtcagcctgcgcatatatacggaagctgccgcaaaggacacgactcctaccagaactaccgcaattcccatcgtctctccctgggtggaagcgccgctggtgatgacaatagtccccgccagtgccagtacaaggcagaggcattttaccggggtgattttctccttgaggataatagccgcaaggatagtcaccgctaccggtgtcatggcattaatcagggctgccatagaggctcccgtcagtgctatgccaagctgaatcatctgaaccgtcaggaaatagccgagcgcgcctacaagaaagaagtacttccagtccttcctgtctatctttgttttcaggtgcttacgcgacatgaaatataaaggaatcatcgcagtcacgcaccgcaggcatgccaccagagaagccggtacatcgtccgaaatcatttttccggtaacatagatactgccccagataaagaaggtaaaaaaaagtaatgcaaacgcaagtttttggttgctgcgcgccatatctgcctcctgattcatgcagcggaaaccatattctgttgtccgccgctgtcagtgaacggatattcccggacggcggccgtttaaccgccgttccggcaaaaatccatttattgctgctttataatactgttccggtcggtttctgatatccggatttattttgatgcgctttccagagcttcctgcagagttgctccaaggccgtttacctggctgtcgatatcggagtacagctttttaactgtgtcaagattaagaatctcatcatagaatgcattgtcatactcaataagagtcatgcctttatctacaagcgtctgcttattctgctcatcaatctcggaaagctgcggacgaagctctgccaatgcttcggtaactgcctgattcagagctgcctggtaagccgggtcaagggaatcatatgcttctttgttgattgtcatctggtttgcatacagaatatggttcgtgcaggcaagtactttctgaacctcgttcaggttagcgcctacgcaggtatccgcggcattctcctgtgcgtcgatcgtgccgctctgcagtgcgaagtaaacctcggaccatgcaagaggtgtcggctcggctccgatagctgtccagaatgccatatggttgctgttgttcatcgtacgaatctgaagagccttgaaatccgcaagcgtattcagttctttgttggctgttgtcaaacggtatgtagcgttctgaagaatgccgagatagtggaaacctgcagcatcaaaagctgatgaaagctcggtgcggaacgcagaatctccgtttaaaacaccgtcaatcgtatcaccgtcatacttcgagaaaaccataggaagatcgaatacggctgcctccggaacgaacgatacgagcggagctgtctggcatactacaatctggatatcgtttgactgcatctggcgaagaatgtctccgtcgtcgcccagttcgctgtttggatgataatcaattgtcagcttgcctccggtaatctcatctaccttagctgctaccagctcaccgaagagctgtccggcagcgcctttacttgtattgtcggctccaatcagttccacatcatcaagcccttcaaagctgcttgtatcgacatcggccgacgccccgccttcggcttcactgccctctgctgccggtgcctgagttggcgctgttgttgttcctgtgctgctgccgcctccgcaggctgacagtgatgctgccattgccgccgccataaataatgctgctgctttcttcatttttctcattaaaatactcctcctttaaattgtttaatatttactttggttactattgttttaaaaagctatactgtaaacagtagctgtaaaactcccccgtcaaacggtaacctgcacgctccgcacacttatcaccgccttcaatccaaatctgcttttatttaagcagattcggcaggaatgtggagaaccacggaacataagtgataataactaatgctaccaggaaagctatcataaaaggaacggctttccttgccacagacatcggaggctcttctgcgatatttccggccacaaacaaatccagtccaaaaggcggagttgcaagaccaatggaaagacagcaaaccagaactacaccgaagtgtaccgggtctacacccagagcctgaacggccgggagaagcaccggagccaggatgataatggctgggcctgtatccataaccataccgagaatcaggaagatgattgccagtacggtaagtaccacgataccggagtggaagttgccgaggataaagttctcaacaatctttgttgcttttgtaagggacagtacacggccgaaggcagttgcaaacgcaagtacgaaagcgaggccgccgtatgtttttaccgactcacagaggaacgggatcagttcgtttaccttgatcgatttgtaaatgaacagggaaacgatgattgcataaaagacggaaagtgttgccgcctcggtaggtgtaacgaagcctgtgtagataccgccaagaacgattaccggacacagaagagcccagaagctgtctaaaaacagttttaaaaatccggcagagcgaagctctttcattctggcattaattaaatcgcggtcctctccgtggcgtacacagtaatataccgcatataccatcaggaacaaaccaatcaggataccggggaatactccgccaaggaacaggtctcctgtggaaacgccggttgccagtgaatacagcacgaatggaatggacggcgggatgataactccaagacctccggctactgcaatcaggccggcactccatttcttctcatatcccaggtcggtaaggaaaggaacacacatggaaccaaccgctgcggttgtcgcaggaccggaaccggagatagcgccatagaacagacatgtcaggattaccgcacagggaagtccacccggcattcttccggcaaaataagagaaaaagttaaacagttttttggaaattccaccctttgccatgataacgccgcccagaatgaaaagcggtacggccaaaatcggtgtggagttggcacctgaaaaggtgttatttaaaagctggacaacggaaccgccttttcccattaagaaaatcggagctatcgaacccagaatcatgctgacgccaatcggtatggataccgctattgcaatcaggaaaactacaaataccaataatgcaggcattattcttctcctcctttcgccagggcagcttcttctgctgcgtctctcatcgtctgttcaatcgttgttaattctttttcattaaaatgtgtaacgtggatgtacatctgctgtaatccgcggagtaccgcaagaacaaatccaatcagcatcacgctgtacacaatccacataggccacagcatagccggtgaagcctcaccgctggcctgaatgccgcctaccactgctacggaatgataagccagaagacccatacatgccgttgtcacaatatccaccaggatgttgactgtcttacgcactgcgttaggcagcatatccagaagaacgcctacacgaagcatatttcccattctgattgtatatggaagagaaagaaacacactccaaatccaacagaaacggcagaactcctccgcccaggtcagagacggtatccacggaattttgcggataattacctgaagcagactgacacaggcgattactacgagaaggataaccaacaggaattcttccatgtgttcatccaaccatttgactactttcatcatatacctcctttttttataaccccttataaaatcaagctttactttcggctacgatttttaaaagttcctgacgcattacctctaccggagctttctgtcccgtccagagttcaatctgggcagccccctgatataacgacattcccagaccgttcaggatccggcagcctttttcctcggcatccagaaggaactgagtcttggcaggattgtagcatgcatcgaaataaaactggctcggtttaatatattcctttggcagaaggctctggccaatcgtggaacccattcccacgccgctggcattcagcacgacatcacaggcagccagttttgaaaaatctcctaatggaacaaattcagctatcggagcaaatttctcatttatatcaccgacaagcgatattgcacattcctcatatgcatccgttatgtaaatcttgcgcgctccatggtaagcaagaatggaacacatggcacggcctgcgccgcctcccccgaaacagaagaatacgcattcgttaaccttgatgcctccctcttccgtcagagatgtgtagaaaccgactccgtccgtgttataacctaccagctttccctcaggcgtctttaccaccgtattgctggaacccatcttctcgcataaaggatccagttcatccaggtactcaagtactttgactttattcggctttgtcactgcgcatccggcaaaattcatataccggaggctgttaaccacttctcccagatgttcattatctatctcagtatagaaatagcacatattcagtccggcagattcataggctttattctgcattctggctgcgaaggactggctcagcggtgtgcccagcaaggtgatcatctttgtgttgatatcaatattcataatcttccctctttcttatttctgttataatccgatcctcttgaatacggcctttgcatggtccagacaccgttttgcatgacctgcgccgccgtattcggctatgtatttcgtattgggaagttcgatggaacaggtgttggccggcagagcctttaagagatcctccagagccgcaactccctcaccgcagtattcacggccttcacggacaatctgggcaatttccattccctgcgtatctttcggacagtcgcaaaggtggattacgccaaagcgttccgggtcaagtcccttaatcttctctcctgtgacgttatcccagtgacagtatatcatatccataaggagtttaaggttcggcgcattcactttatcctgaatcgcaatcgtctcatctaatgtggtcagccctgaaacaatcgggaactccaggttgacagtcagtccgaactccctcgcctgctcacagatgctgccgtactgctctgctgcaaaagaatgatcctttgtccaaacactggaaagaacatcggtcgctcccagctctgcccgcactcaaatgcctttctgtaatcaccaggaagatcttcgcggacccgcacaagctcaatgtcgaacagcttcatgccggagtccttaagggcttttttgatattcttaaacagctccgggtctttttccagacaagtctgaggttctccgggcaggcccatcggaatagtacgaagacttacatagtcataaccagcctctgcggcaatccggatctgatcaaacggatccactcccggaattgtgagataggccagggaaaactttctttccattaacgattcctcctctttctatattcattctttagttaattcaaccaatacttgctttctgtatttacattctattggattattgcacaaacgtccaatggacagttttcatgaactcatcaataatttgcatgatttcgacatattgttcaatttcactcatagaaaaacagcatattttccaagttttgagtggattaatcgtttttattaatgattccatttatatttaacattggattgaaaaaagaaactccgatatactgaatttacaagaacaatacagactggggcagtgcgcctgcatcctccccggccggaaaattacaacccacttaaaggaggaactattctatgaaacttccctcatcaattacgctgtgtgaggtaggcctgcgtgacggccttcagaatgaaacttatatcttaaacaccgagcagaagctggaaatgctgcgcggactaattgatgctaaattcccggtaattgaggttggctcctttatgcatccgagggctgtgcctcagatggcgaacaccgacgaagtattcaaggccatcggtgacgttccgggcgttgaactccgggccctgattccaaacctgcgcggaatccagagagcgattgactgcggctgtaaaaaagtgaagctcaacgtctccgccagccgccagcataacctgaaaaacctgaacatgacgccggaggagagcgtagcgggatttgcatcctgtgtggacgccgcagttgagaatggtattgcaatatcaggttccatctcaatgccttttgcctccccatgggaaggccgtatcacagaggaagacgtagacgccatcattgaggcctacctcaaggtgggaatcactgaaatctccctgtcggacacctccggtatggccgttccaaaccaggtttacaacctctgctgccatataaaagaaaaatacccgcaggcaacctggtggctgcatttccacaatacccgcggcctggctatggcaaatatcatggcggccatggaagcaggaatggaccgtttcgacagctccttcggcggactgggcggatgcccgtttgtccccggtgcggcaggtaacatatcaacagaggatgttctccatctgtgtgaggaatccggtattgctacaggtattgatatcaccaaagtaatagaactttccaggaaactgaaagaactattaaatcacgatatggacagttacatactgcgtgcaggccgttcctgtgatttaatccagtccaaccaggattaaccacaaaaagtccgcggcgtttatgattcggccaattcggaaatcataaatgccggggacttttttctataataataagctttcagtccgaagcggtaacctgcaagctcatgtctccgccatcaataagctcagccccggcagaatcaaattctgccggggccggcttcttcaggggaattatatcttacggtaaaagtatgccgggcacacttcaccgctatcaataagatactcctgccgccggctgtccggaatgcacatttccatcatgcctttttggggatagcttaacaggaatatcgttatcggcgtttggaggattaaactcttaaatacttatcaaccagttctttgtagtaatctgctccgataaatttcaggtagtcggcaaaagccataaactctccgccgtatccctcgtctgtctcattctccttaatatgttttaacagagagagaagggaggctgtctgtgcaaaaaggcagcttaccgggaacgtaatgatcttgtagcccaatttaccgcagtctgcggctgtcattccgtcattgattcctttattggcatacaggcccagatggatcggcccgtttacccttgggggaagggcctccagctcctgacgtgatttcggcagaatcttaaccatatcagccccggcttccatatatgcgttggctctctcaattgcctcctcaaacggtgcgtcggtacgcgctataattaccatatccggatcctcgcgggtcgcgaccgcagcctcgattttcccaaccatctcatcagtgctgataagctccggagctttaataaacggacagttcggcggctgtttctggtcctctataaacaggccggccacgcctgtcttctcatactcttttactgcgcggattacattgagggcgcttccgtagcctccctcggcgtcggcgagaatcggtatgtcaaccgcgtcaaccattttgctgagtattgataccgtctcattcagggcgagaagtcccgtatcaggctgtcccagcactacccgtgcattccgtacccggttgtgcctgcaattgaaaatccggaagcctggatcgcccttgcgctaagcgcatcatatgcacacggcgcaatcagataatcgttttctgcaagaagccggcggatctttttactctgttttcccataataaacacctctttcttctgacctgtctttagccgccgcgccaaaccttgcggctttgaattgtttttattatatccctgcttcccctttgaagtctaatacctgttttatatgggattgatagaatgattctatgaagaaaaatcgggctatgttgcattttttacaaagatcagcctcaataataatagataactatcaatataatacaaaacattttgtcttctcgtgtataacaggattgtatttacaaaaatgcaaaagtaatctgattattcttcttgactttaacttgctaccatgctacaatgctgaacattacacaaatacgagggtccaggcagcctgccataagctctgttgctctgttaacacggcgtggaaggcggccggaagtgtaacgcaagattgcatgtgaggaggaagaatctatgtcgtatgtcgaagaaatctacaacaaaacagtgaggaaaaatcctggtgaaaaagaattccatcaggcagtgaaagaggtattggattctctgaagctggtaattgacgccaacgagacacagtacagagagacggctcttctggagcgtctcgtagaaccggaacgaattatctccttccgtgttccctgggtggacgacaaaggccgtgcacgtattaacaagggctaccgcctgcagtttaataatgcaatcgggccttacaaaggaggcctccgctttcatccgtcggttaaccagggcatccttaaattccttggatttgaacagacatttaaaaactctctgaccgggctgcctatcggcggcggcaaaggcggctctgattttgatccgaaaggcaaatccgatcacgagataatggtattctgccagagctttatgacagaactttataaacatatcggcgccgaccaggacgttcccgcaggcgacatcggcgtgggaggaagagagcttggctttatgtacggccaatataagcgcctgaccggcctctacgagggtgtgctgaccggaaaaggtttaacctacggcggttccctggtgcgcacccaggctaccggctacggcctggtctacatactggaagaaatgctgaaaagccacggtatcagcctggagggcaagacggcaattgtgtccggctccggcaatgtagcaatctacaccgtggaaaaagcccagcagcttggtgcaacagttgtggccatgagtgactccaacggttacatttatgacaaagacggtatcaaacttgatattgtgaaagagattaaagaaatacgccgcggacgtattaaggaatatgctgatgtggtaccgggctccgtgtatacggaaggaaaaggaatctggtccgttccgtgcgacatcgccctgccatgcgcaacccagaatgaacttaatctggaggatgcaaaaacactgaaagcaaacggctgcattgctgttgcagaaggagccaatatgccgtccgatatggaggctaccgagttcttcctggacaacggcatgctgttcatgccgggaaaagcggcaaatgcaggcggtgttgccacctccgcactggagatgagccagaacagcctccgcatgagctggacattcgaagaagtggatgaaaaactccatgatatcatgaaaggaatctacacgaaagtggcagacgctgcaaaacgatacggcgtttctggaaattatgttgccggagccaatatcgcaagctttgaaaagattgcaaatgctatgatggctcagggatttgtataggcaccgccttcaatcaaaagaagacaggacgcgattttgatatgcgtcctgtcttttcgatataagcagcctgtgtatggctcctccattacgttactgtttcttcactaccggaatccatacctcatacttcgcattttccggattggggctgatgtatacctcaatgtcgggagcgctgccgtattcatatccggatgtgggcagccactctgtcacgatgcgccgttccagatcctgaaccgacagattggttcccgtacccggaaaaactgcccatgtggacgccggaacccggtactcttcgaacggggcctccgccggccgggtaccggaaacagcgataaaatatctccagtcctcctcattattgcagatgcttactcccagcaggccggccggctggccttcaatcatcgatgccagcttctgtatcgttccgtcggctgccgcctttccccacatctgcggtacaaccgcaaaattttcttccagatttttactcataggctgtgcaatgccgataatacgaaatgcctctttttcttcgattctgtaattcattccttccactcctttaatcgtgattgcaaaactgagcggaggataagattttaccggagttcccttctttttagctgccgagggcgtaattccctgcacgctctggaatgcgcggttaaatgccgtcggagaagcatagccgtacttaagggcaatgtcgattactttttcatcactgctctgcagctccgccgccgccagcgtcatccgtctgcgccggatgtattcggagagggggatgcctgccatatacgtgaacatcctctgaaagtgataagcagaacagcaggctatcttcgctgtctgctcaaaatcaatctcctcggtgatatgctcttcgatatagctcattgccttattaaggcgttctatccactccatctttattcctcctgcctgtatgctacatacagattctatctgcatttcatatttttttcctctcttttcctgcacaaaaaagagagtttcctgtaacagtcctgccgcctaactcagaaccgcctcaggaggcagcttctgtgagtagacgacgacaagatcctgatcgagtatcatcgtatccccgctggggataataacctgatctccgcgtttgaccatcacaataatcgtatttttgtaaaacttagcctcacggatttttttattgcaccaacggtgttccggtgtaatacgaatctctttcagaagaatttcgcggttatcggaaaatccttccgcgcccagaataaccgtatctccggggagaatttccgtattccccttgggcaccaccacccgttcccccctcttaatcactgctatcagcgttcccgggtggagccggatctcgcgtatttcccggttcacccacggatgctccttccctatgggaagctggataaactgaatctgcgtattctctgtgtagtcggtaaatgtcttcatgacatcggcattctcatctatcatctcacactttttcgccagaaccggaagcagggaaccctgcaaaatgatcgagaacaaaactacgcagaaaactatatggaacacgtcgtttttcgtatagctgtcactcaccgccgccataatagcaaatacgatagatgccgccccccgcagtccggcccatgacacaacgagatattgccggaacggtgtcttaaacggagccaggagcaaacccactgctgccggcctggccacaaaggtcagaaacagggcgattgccaaggcaggcagaaggatagaaggcatctgtgaaggaaatgccagcagtcccaaaaggaagaaaataagaatctgcataaggccggtgaatgcgtcgaaaaagctcaccagcgtcttttggttcttcagagtctgattgcccagaataattccggtcagataagtgctaaggtagccgttccccctatcagggatgaaaaggcataagaaatgatcgcaacggcaaagatgaatatcgtgtcgaatccctcaccgtaaaactggtaccggttcaggaaacgtgatgcggcaaacgccactcctgcgccgaccagcaggccgaagagcagctgacttgcaagcattccggcgatctgcccgactcccattgtcccggacatcgcggtgagaacgatgattgtcatcatataggaaaagggatcattacttccgctttccagctccagcatggatgccgaaccgtattttaagttaagcttgcgggaacgcagaatcgagaatacggaagcggcatccgtggaaccaagaacggaaccgatcagcataccctccaggaaatccatgttcaaaacgaagtaacagaacaggccggtcagcactgccgtcagcactacgcccaccgacgacagaaggactgattttcccgctaccggccgcgcttcgctccatcttgttccaaagccaccgtaaaacataataaaaatcagggcaacggaacaaatctgttccgcaatttcataattgtcaaacgcaatcttaatcaccccgtccgagccaaataacatgcccagcacaataaacacgaacagggtggggacaccgatgcgtcccgagattttactgctcaaaatacatatgaagataacaatggatgtaataaatagtgatagtgtaagtgtgataatatcagctcctgttagtttatttcttttattctacaataatatgccggagaaaagccaataaatccgtgttcagaaaatgttaagaaccagatagccctgtctgtttatccatcatttcttcgaatttttccaccgttaacggtctggcataatagtatccctgggccagacagcaggaatagcttttcagcatctccacctggccctttgtctcaaccccctcggccagcaccggaatggacagcgcctttcccatggcaatcaccatctgaagaatggtttccgccctgccgtacggatccggttcgcttaagaatctcatatccagcttaatctgatccaccggtgcctctttgagcatgttgagtgacgagtaaccgcttccgaaatcgtccattaaaatcttaaatcccattctcctaagctgcctaatatgactgtgaatcgtccttgaatctgacgcataagccgtctccgtcacttccagttcaagcaggtccaggggaagccggtacttttgggccgtcttgtacagatgctcacataatttggggttataaaaaccgattctggacaagttgaccgataccggcaccggctgcctgcctccgtccagccatcttctcagcactttacacgtctcctcaaacatatagagatccaactggccgataaacccgttatgttcgaaaatcggaatgaaatcaccgggcggcaaaattcctctttcaggatgtacccagcgcaccagagcctcggctccgatgatcttctctgtttccatattgaatttcggctgtaagtatacatggaactgcctctgctccatggccctgttcatctcactgacgattagctgtgaatggattatcgcctccctgtgggaatcgtcatagacggccacgtgtcgtgcataattgcccttgatgctgttcaccgcgatatgcgctctgtcgcacataatgttgatgctcttatccctgccgtgaacgtgataaatgccgcaggaaacttcaacattcatgtcaatcggatacgttttcagctcacttcttatcttatccgtaatctcctttgcatattcatcatcttcctccgtacagaccacgaagtgatcgccctcaaagcgggaacagactccccccttctctgccgtccattctttaataatcccggccaggaaaataaggatgccatcccctgcctgtacgccgaacaaatcattgacaaccttgaaattctccacattaaagaagataatttgaaatcgtctgtccggtctttcgtccatataccggagcgcccgttcatagaacgctttgcggttatacatccccgtcagctcatcagtctcagccataagctggtaggccttcttctcctttagctccatcataatatgcatgtgcctgcggtacatgagcgctgccagaactattacggcggctgtcaatgcagtcaggaagataatctgtttcctgtaaaagtacatagtatcaatcaatgtatcatgataggattgcgccaccgtatgcgacattataatctggttaatcgtattatcgccaagggaattgatggatttgttcaggatactcagcaatttcctgtccgcctccctggaaatcatcatgcagcttttctcctccattgactgcatggacgtgacagccagcgttgaaaagtctctcttttgcataaaataattggccgcatgggtattctgtatcgtcaaatccgcctcatgctcctttaccgcggtaaaacagtcttccagattctctttaaatataataccaaaccgctggaactcggcgggcagaaggctgtccgcgttctcgtaggaacagggcagcgccatcactccatccttcaggccgaagatattgactccggagtttgatataaccagggatggctgggacatgataatttccgtaagctgcacgcctgtctcccggttcttttcctgactgaataaaattccggctgcaatatcagcgcgtccggccttaatcaagtcctccggccggctgccggacggttcggcgctcagtataaactccagtccgcttatctccccaatctttcttgcgagatcgggaaaaataccggagggttccccgtctccgggtcaacgtaagaaagaggataaaaaccgtctatacaggccacggttaatggagcgctttcctttacatattcggcctcctccctggtcaggagcggctcctccgtcacggtattatctccgtaatattcgtaataaagctcttccactatgtatggtgatgaggaatatatgtttctcagggcatcattgagactttccagaacctcatcattgcctttggttgtgataatataaaagggagccgtgccaagcatatccacaattctcaaatcgctctgtctcgacagactgccaatcacagccaaatctgccctgccgctttgaaccgcatccgtaatttcatctaccgaatcaagctccaaagcctcgtaactgaagcccttgagctttgcaaaatccgcaaattcatcactctgataagaatctttcagcacggcagccgtcgcaccgtccatcgcctcataatcctgataatatatgtcattgcttcccttattcgtatagacaaaggtactttcacgcccgattggaaactccgtatacgcgaaccgggccctcctgtccggcctgctctgggcgcagcatacgagatcgatcgtcccccgctccagctcgttaagacattcctcccaggtgttgtaataaaactcataccgccagccggtatactctgagattttatcgagaaaggctacgccgtatccatcaatatatccgccgttctcctgcacgataaacccatcataattgatatatccgaccctcaatgtctgtctgccttgctccggggctgatacagcagttccggccggcgccgtcagtggatataaaaagataagcacggcagaacaaaaaaatattccgaactgcctcagatatttcaacatattccattcccctcccggcagagcctgaaaaccattccgcctattgctattatatcacttctgccggaatttgcactaatcgccgccgctttttgagcgaagtgccaaaaatcccccaaactcttgaatttacctgaacccggtgctatacttcacccttggaaagatacatatccgttataaagtgaggtatagtttgaaatgaaaagaaaatttttagccgtggggctggccgcagccgcagttgtatcaatcacctgcggatatatgaccaccgcaatggctgccggaccagtgaatcagacggaggatgaggacgcctgtgatttgcaggacatcatggagtcgatagaggatgaggcgctcagggaatcccctgccgccgagatcactgcatttgccgccgagatacaggatacggtatcaggacgtgacctggaagccctggccgaactgtgcgattttcccatcagcgttacaatgcaggacggaacttccctgaccgtcaattcccgggaagattttattactcttgggaaggagtccgtgttcacaagaagtctggtacatgaaattggaattgcagatccggccggacagcagatttacggaaacggcatcgtcatgggaaacaggaataacattataatcaacaggatgcatggctccctggcagttaccggatttaatttttaacagcagaacgctcaggcatacatgtttcagggattcaaaaaagaggagataagatggcagccctccggcttccacatatctcctcttttactctgcatcggaacctcactacaatgaaatatcgctccccgccctggctcttctgtctctgatggagtgaatcacaggcaccatgaaaatcgcaacgatacctccggcaaaaccgttattatacagattcattccgccgtagacaatgcctacattcatcgccaccgatgcgtggaggaatcctgccagcagaccggcaataacgccgaattcacctgcaaccggggccagcgtcgtggaaaacagcagcgccagcatggcggacgggttattaatctcccaggcatgggtcaggctggccaggcatacgcccgtcataatcgggaaaatgttcctcagatgctttcccgtcgcactgaagccaactattgtaaatattccgccgattgtgggcccgttcaaatcgcttcccaccgccagtacaaagagcgtggcaaagatcccgttgattcccatattcaatatagtagcggctccaccctcgtccgccagataatccgtaccggatataccggtggtttttaaaatccggcagtaggcatgaaccactccctccccgcccaaaagcagggcccccagtatcatgccgccgaacaggatgcccaataatatcagaaacaaacagttatttccggaagaccagataagccgcgcttccgtctctataccgaatgacttcagggatgatacgataaccgtggcaattattccggctgcaaaaccgacattgtaaagcgagtagcccttatgggcatagtgaacatgggtagataacggcggaagcacaaagccgatagaaatccccactcccacggtcaggagcagccgtccgagcaggggcatatccacgatatgcataatctgtgtgataatcggcgataaactggtaccgtaaattcccacatatatatattttgaaagtgaagttttatggtatttggcgtataaaagaactcccagaaggatagcccagatattcatcaggtttttgccaaaaagtgagaatccaaacatcagacagctggacgtaatggtgtgcccatccatctccatgtcgagaaaatagataaatccgatactcattaaagtgagggcgccggcgttgataaaggctgccccaatgccgcccactgctatgtagtccgtaatcaggaaatccggctcccttatcatggtgtaaacgccctcgaggattccttccagcggctgaagcaaaagtcccgcaacaatgaagtaagctggaatcagagccagcaaaaggaatttcctttctctggtcagagatttcattttgatcataaatacactgcctttccgaaaaaaagggtatgcaaattctaaagtacagctcctttgcataccctgtccgtctgttaatataacgttaattttactctttctatattttatttcttttccggaatatttgcaactattatttttattttataacaataataaataattgtttatattcagccggtttttctcacctcgtcctcttcctgcttttgttccagtttttttacaaggacggactctatccgtctgttttttatctgttccacatgaatactcaggccctccgtctccacatcgagagttgtgccgtccgccggaatggtgttgaggcagcttagcaccaggccgcctacggtctcataatcttcctgctcaggcagggtcatccccagagtctccgagacgtccctaatcagcgtgcttcccggaaaacgccagagattgtcatccatctgctcgatctccggttcttcctcggcatcaaactcatcataaatgtttccgactatttcttccagaagatcctccatggtgatgatgccgctaatctccccgtactcgtctatgacaatcgccatatgtatcttctttttctgcatatcgccaaaaagctgatccgcatgcattgtctcaggtacgaaatagggctggtggagaagctcgcccaggggctttttatccgttctcagatttagcagatactctctggaatagagaatgcccaggatgtcacggccgtctttatcatataccggaaaacgtgacaaaccggtttcacggattttttcaacgatctcttcttccgtatcaccaatttgaaatgactccacctcaaagtcccgtgtcattgcctcctgaaccgatgtgtcgttaaactcaaatacattctggagccactccgtctcctcttcgtcgatagcgccgttctcttttcccaggtcaatcatcatccgtatctcatcttccgtaacctgctcttcctctgcttccactttcatatgaagaagcttcagcatggtgttggtggaaaacgccagaaaaccgataaccggtttcatgccaaaagcaatggccgataccgtgccgctggcaatcttggccacttcgtacggcttttgcattgcaatacgttttggcacaagctctccgaatatcaatgtaaagtacgacagaataatggtaatcacaattacagaaaccgtatcaagcgcgctcaccggcaaatattgaaaaccaagaccgttataaatccagtttgtcaggctgtctgagaagttctccgcagcaaacgcgctgcccaggaatccggccagcgtgatgcctatctgtatcgtcgaaagaaatccggccggttcttccgccatcctcagcagccttcctgccgtcttatctcctgtctcctgcaatctcctgagcttcgccgtattaagcgatatcacggcaatctccgtcgccgcaaaaaaagcgtttaaaagtatcagtgccgcctgcacaatcagttgttgtggtaattctcccaccgttatctctccttttcatttcttatattttgagctcgaaaaggcacaacctgcttaagtaaaagcagattgcgcctctattttacggctcaatatttaaattgctgttttttacatcagcgtcgggggcgctgtcgtccatcctgtattacactccttttcaactgccgccaatataccggcggtattgtcatgcaccattatattacaggatatgcggtcaggccgcaatagtttacgggagagcttaacgaaagcttagcatgggttgttacgcttcacagcccctccaaaattgattccgctccttcccccggtcagggtttcgccagggacggaagactcaggcgaaggttttcgcacaccggacatagtccgttccggcggcgtcctcacctgcttaactaaatacacaaccgtgtgagcagtaacgttactccgtcataattctgataatttccttatccgtctccttcatgccttccttccccagacggccgatattgcggatcgtgttttccacgcccttggctacaagaccgtcaccgccgtagaactgctggcctttcttgtacatcttatagcccagtatcccggtatccaccgcaaccgctatctttgccgcgcaggaggctttggccccgtcacagacgattcccgatgtgatggccagagcgttaaccagagtgtgggcaaccaccttcagatcgccgccttccaggtaggcaattcccgcgcctgcgcccgcacctgcgctgacagctccgcaataggcggacaaccgtccaattcctgtcttctgatgaagtgtcacaagattggataacaggagcgcccggtacagcttttccctgctgcacttcaattcttttgcatattcaattacaggcagtgacgccgtcattccctgatttccgctgccggagttaataataacaggcaggtcacagccgttcatccttgcatcggatcctgccgccgccattgccttagccctgttctcaatcctgtctccgtattcctccatcagaacacggccgatgttggcgccgtagtctccgcgcaggccttcctcggcaattgccgtattatatgcaatctgacggtccaggacggcttttacgtcctccaaatctgccgtatcggcaaaatcatatatcttctcgattgtcagcagggaatagtcgggggcgtcacaatcctcttcttctcccgcctgcttttcaaacaggattttaccgtctttttctatctctataatattcgtatgctcctgcgcaattctcacccgcgcgcgggaaccgtccttctttgccgtcaccgccatatccaaaaggtagggcgtgtcgagaggctccaccgttatctcaactttctccatataagcgccgaggcccgctatatcctcgtccgtaacctttgacagcacttccagttccaaatcttctcttccggccaggatgccgacggctgctgccgcctcaattccccggcgcccgccggaattaggcacaattacgctttttacattttttacaatgttgccgctgacctccaccagaaccttatccggcaggacccccagcaccgatctggcttttgcgctgcaataggccagggcaatcggttccgtacatcccattgccggaaccagttcacgttccaatatctccacatacgtcttataacaaatattatccttctccatttatgaaatcctttccccttcttatcggaacagttctgtcgacaaatagcgttcacccgtatcgggaagaaccgcaacaatccgtttcccttcgttttccggcctccgtcccagcacaactgccgcccacagagctgcgccggacgaaattcccgtcagaaatccctcttcacgggccgcagcttttccgagccggtaagcgtcttcttcctttgccgtaataatttcgtcgtaaattcccgtatcgagtatttccggtatgaagccggcgccgataccctgaatgccgtgcggtcccggagcgcccccggaaagaaccggtgagcctgcgggttccaccgccgccacatagacggacggattcatctctttcagatagcgggccgtcccggtaatcgtcccccggtacccactgttgcaacaaatatatccactttcccgtccgtatcctcccaaatctcaggaccggtactatgatagtgtgcgtcaggattggaggggttggtaaattgtcctgcaagccagctgttatccgttgtcttctgaagctcttctgccttttctatggctccctgcatgccctttttcccgtccgtcaataccagctcagccccatgcgcctttaacagcatcctgcgttcctcactcatactgtccggcatgacaatcaccgttttgtagcccctggcggcagctacggcagccagtcccacacccgtattaccacttgtcggttctatgataaccgagcctcttttcaggattcccgccttctccgcgtccagtaccatctgcagtcctaccctgtctttggcgctcccggccggattaaagcactccagctttgcaaggatttcagcgtttaccccctctgcctttgccagtcttctgaagttcacaagcggggtatgtcctaccagctcttcaataccctgatatattttgcccatggcggctccctcctttttccgtcagcaggttgctccccctttgagatgaacctgcgcattaataatctcatcttttcgttccagcagctcatttcctaaaagctgggcttccacattttcaaatcccagtctctcaatcgtatcggaaaagcgctctccggtgattccctgctcacggaacaaaagaatcgctttttccagaacctcaagcacctcttcttccgatttgaaaatcttcccaagctccctgccttcggccgttctcttgccccatctgccgccgattacggccttaaatccctttgtctcttccgtcaccgcgtcaaatggacatttgcttgtacagcgtccgcagttattacattcctcttcaggtatgcggaccgtgccgtcctccacggccgccgcgctgacgggacaggcgtccactaccacacagcttatgcagcccttgcagttatccgcatcgtttgccggtatgctctgtccgatgataccaaaatcattcaggtccggctttacacagttattcggacagccgccaaccgctattttgaatttgtggggcagcttcacctcatggtagcctttatagaatctggtatgtatccggtctgctattgcaaatgtgtcacacagtccatactggcatgtggttcctttgcaggaaacgaccggccggactttggatccggttccgcctgtctccaggccagcctcagcgacacattccctgaacggttcaatattctcatatggaatacccgttacctctattgtaagacgggttgtcagtgcaacatggccgtccccgtatttctccgctgcttccgctattttggcactctctgccgccgttatctttccgtttctggtgataatcctgccgttaaagcagtcggtacctttattatgcaggaaaccaagcgccttgactctggtaatgtcctccgggctgactgtaacctccttgcactctgcctcgataagcccctctgccgccagaaaattctccagcagcctgtaggagatttcaaccgtcttgtagcaccggctgtcctcctgcgtatatttttctttcagtacggaacattttgtgcttcccagctctctctcgaacgtctggcagaagtttgcacacttttctttgaacccttccgttgcatgcgcccgttcctccaccagaaacatgctgataaccgccatggcgctgctcaaggctccgcaggtcccgccacaacccatacctccgccgaatccgctgaccagacggaatgagtcctcattcagtccgagatgatattcctcatttgctgcgcggagtatggtttccgcacagttatagtccttttccagataataacggcgtaatttatggttgttcatttgtattttcctcacttctatatttatatatctatgcgtcaggtgtgcgcctgcgaagcgacggcgcagcggagaccctgcggctagctttgcagacgtgcgcccggcgtggatagcgggcgctgtatgcacaagtacatagaggacagactgctagctccgcagtccctttttctccatgatttccctgagttcatccacgactgcgcccagctccttgccctcttcatctatgataatatcggcataccgctcaaaatatgaaactctttcattataaagttcttccagcgtcatcccctctttcagaaccacgcccctgtctactacatctcccagtctgctgcataattcttcataactgattttaaggtaaaccaccggaccaagagatttcaggttttccatagcttctttaccatatatcacgctgccccgggagcgattacggcccggtttgccctgagtcctgcattgacccggttttccacctccataaagccgtcaagtccctgctctttgataatttcttttagcagctttccttcctcctcctggatcacaatatccacgtcaatgaaggaataaccaagacgctttgcaagcagaacgcctaccgtactctttcctgcggcgggcatgccaatcagtgttatgttattcttccggctgtcctttgtattatctttcatattttcctcccggcctctttttatttccccttgcaggaacagttttctttctcacactgtaaccgaaggttcccagcagactggaaagaccataatattctccatgggaatagacaatcggagccgctttttgaagttcaaatctgccctgttcatttaaatatgcctcgtcaacatccactgccacaactctggcaagaaacatgtgatgggaacccagctccctgatctccgatacgcggcactcgatattgacgggactttctttaatcagcgggactttcacctcctgcgccgggatgggggtcagtccggtctccttccatttatccgtgtctctgcctgactttactccgcagtaatcggtagcccggaccagtttttccgtcgtcaggtttatgacaaattcgcctgtttctttcagcatcccataggaataccgctccggccgtacggatatatatgccatgggagggttcgtgcagacggttcctgtccaggcaattgtaataatgttgctctttccttcccgatccgccgcggtcaccataacggccggaaccggatataccatatttcccggtttccagagcatgcggccattaccgttgctgtttttattgtcttttttctctctcatttcagttatcctctttactctaaacctactatgtatcatagcaaaaaatgagggtaatgtataccctcatttcagcctgagagaatcagtgttactctatacagcttgccgccttttggcatggtgtgaacagtaaggaatcagaaaagttctgtataaattttcagcacccgggcttcatccagaaaaacaaaattgttgcccataagacggccctgtgtttccatgacgttccttgtgaagtctttaagttcagacttcgtcacgccgtatttatgcagcggctttttaggaagaatctggtccaaaagttgttccaggcagtcgtatacatcccttacggggcagtcgaggaggcctgccaaatatgtatttaacactgcaatttccccatcttgacggatttccatataatttttcaaaacaccggtgaacatagcatagttgctctctccatgaggcacatgatattttccgcccaaagggtaactcatggcatgaaccgctgcacagcctgcggttccgaaggaaagacccgcatagttggaagcagtgagaaagtcgttcagcagcggaatccgggcatccctgccctccctggcgatggtctgataaccgcggattatcatctcaacagccttatatccgaaaagtttcgtgtacgttgttgctttgggggagagaatagactccaccgcatgaaccagtgcatcgatggagcttgctgcaaacacgccaaagggaagcccctctaaaagctgcgggagcagcacagccgcatctgcatacatcgccggtccaaccagacccattttcgtattaatacgggtgcggttcaatatggagatattcgtgacctcactgccggttccacaggtggtgggcacaatgattaaggtacggcgctttggcagcgccggagccatatcgtagaggcagtcgatgctctcgtctccggccactgccagaaccttggcaatatcaatgactgttcctccgccgatggcaataacccgtttacatcctgtttttttcatatcctgcatgatggcttccgtcatggtgtcggtgggctcgccgatcccgtatttttcctgatatagtacacggcagcctaaattcatggagccgaaatagggctggtaaatgtattcgttggtcaggatgaggtctgtttcacaaaggcggaattcatctgcaaattcctgacagctgttaaagctgtgcaattccggtttccaaattatctctatcataatgtaccatttcctcccgtcatctgtttatccgccttatcctgcttaatcatacgtgggatagctataaatattggaataataacggcaataagagcaatatttccaaggagcgtatagccctttttcacaattaccataagtcccacctgggaaagaataccgcatgtcagcaagaaacccagggacaggataaagaactttgctctgtgggagagtttctccgtcttccatacaccggcccatctgttggaaatgttgaaagtaaagctgggggctgtggacgctaccgcaaaaattactacaacccagtaaacagcagtaagtacacccggaaaataattctggcaaatcattaaaattggggtaccctgcatgacgtccggcatgaaaggcagtacaatggccccagtaattgcaaacagcgccgtaacgagaacgccgatcatgatgccggagccgatggcgtcccggttatcacggatttgatctgaataattgctcagtgtggaaccccaggctgaagtattaaaacagtaggaaaggaacatcagaaaatgagcttttactgttgtgcctccccagtccaacccttcctggaagtttccaatcctgctcaccagcacatcgccgcggattgcgatgacggaaatcaaaataactccaaggcacagaataagggaaaccgtcatgattgtattaaatttccggagaaagcctgctccataaatagtcagaacggcaaagagcaggatacccatggcactgcccaccaatacaggaatgcccaggagagcatgcataagctcggtgaacagagcaactgtggcagctacattgaccagacctttcagcatggtgaagatatcaaaaaatactgttacgccgcctctaagcagcgggttggcatctggtttatgtaagccgtaaagcgccaggtagtattgattataatttttaaccttgtaaatgcggataaataccaggctgatagcacagaaaaaagtcataaaggcaaaaaagattgaaagccataccagggaccagccgccgccaagggttacaatataggcggacgcataaacgccggaggccatgttagcgccgcaataggtgccgaacatcaatgctcctatgccgaaccaaatggaaaaagttttggcaaatccgctcttttttaaatattccataattgaatctcctttcatttagaatagttgcctcatttgttaatttaaagattccgaattatattttatttttcttatgggctgggccgcatatcgaatggctgcctggcgtacccattcaaggcgtgaatcatcaatgtctgcgggaaccgtacagtcggcgcccaccataatccccacctggccggcctcatcaagaatctgatacgtgtatttctcaacctcttcccgcgttcctttgtagagaacccccttctgttcaaaaccgccgaaaacagccttaccgccaaaaagccttttgccctggcttagagaaaccttttccgtatggacatcccagttataggcagcggcattaaagccggtaaacagattgagatcgttcccctgtccgataaaaccgcagatatggaggatattcacatcgctgagtttattggcgtcatccaggacagctttttcaaaaggtgaaatataggtacggtaaatctcttccggaaaaaagccggcctggttgtttacactcagatagattccgtctactccgcactcctttatgagaaggcggtttaattccataattccctcgcttacagtcttgcaggcttccccaagcgcctccggatcctctttgataaagcgcttaattacagtctccggacctccgagtccgggcctgcgtccttccggcagcgcactgcgcagaaccaaagtaggagaaaagctggtggcataaaccggagcgtcgctgtcggcgtaaatctcacgtacccgttttgtcagctccaaagtccgcttcacaaatccagagcccgaagatagcggttcaatttttcttaaatcggctgctgtctttacaaaggatgcctccaccggcataagcatcagggaatcgttcatcacctttgccacatcgggatcaaagagcttgcgggcaattcggtggccctcgatatttttttcaaaaacctcatcatcttcgatacccttaccaaaatccgtccagtcctccaggaaatgatggaagaaagcaaccggaacgcgatccaccggcttgttcgccagaacgttaagaaatctttcatgttttgtcatagcagaatctcctttgtttgattttttattgacattttcgatataaaaagcttatcatataagtgttcatttggataatatatataaaaaccggccatatgaaaaaaagctatatcaggatagaagggagaatcatcttgaaaattaaggttctggaatatttcattacgctggcggaatcacagtctatcaatgaggcggccgggaagctgtatatcgcccagcccagcctcacaaaagctctgcagctgtttgaggcggagatcggcactcagttgtttcaaagaaaaaaatcgggaatacagcttactgaagccggaaagagaattcttccggaggcaaagcagatggtagaatattataacggttggcttagcctttcagaaaaacttcccctgcgcgctgtagatatttatattcaggcctcttttcccaatttcctccttccaaaggtagttctgcagtttaaaaaactgcaccccagcctgcagattaattgtgaggtcagccggacgcctgagcagtacatctcccaggacacagaacggcctgttctgtctctttttgtatgcggacagaaaggattgatggagaaatgcgtaaaggcccaaggaacgcctcccatcgttctgtttcagggagaatactgctgtcttgtaaataaacacagcagcctagcagaaaaagaaaccgtagttccccaggatttaaaggaacattatctcgccttaaagtcgcggctggaagcccctcaacagctatgcagcccgttctggatgaaattgttccggttatctccccttcccaggtgattcagacggaatctgtggacagtgtgattaatctggtccggacacagtctgacgtatacgccctttcctattatccgattttgaagaggtacccgggagtatcggagggagaaattgtctctctccctttaagggcgattatacaaagggagacttttgtctgttttattccaggaaggcataccgtcaatatccggtcctgcaggagcttgttacggctatccaggatgccgccgcccagtttctcgctgagaattaatgaatcataaatgctgcggactgccaaatacagttccgcttgatatatccaaagctgcattataatacaacggaagggcaaagccataaacctggcattacccttccgttgctaataatatatctttttaatttttagcagaatctgaaaattatcttattgttccgtcgccaccatcagccccggcaccagctgttttttcctggaaacaacccccggcagactgacaatatgctcttccttatccatctcttcatcccctaagtggaacgcttcccctgccagctgtttggctccctgcccgtcgcagatcagttccgtggactccgtaaggatattcgtcagcataaagaacatcatatcgactttctcatcctccctggccctgtccatataggtcagcattctgcttttcagttcgttcagctcgccggcattcagggatgtgatctgtccgacaccgaacgcaatctttccggccgtaaaacgcttgaagtcctgataaaagatttccgcatcactctttcccttcagcttgctgccggcggcaaacatcttattagccagctgctccacatcaatcccggcgatagccgcaagcttcatcgccgcatctttgtccaccggcgtgcaggtcggtgagcggaaaagaagcgtatcggagatgatggcgctgcacagcagtcccgcaatcttattttctattgtaactcccgcttctttatacatctgatatataatcgtagccgtacagcccagcggctggttcctgaaaaataccggtcccattgtctcaaccgtgccaaggcggtgatgatcgatgatttccagaatattggcattctccataccgtccactgcctggctgcgttcgttatgatccacaagtatcacattcttgcctctggccccagcaggttccgccgtgatatcatccccttatacttcccattcttatcgagtatcgggaaatcacgatggcgtttgctcgccatcacttccttgatgtcatcgatataatcatccgtatcaaaggtgattaagttttctgtcttcatgaaaaagctgatcggcatactctggttgatcagacgggccgccgtatatgtgtcgtacggtgtcgtaattacggtacagcccctctcctgagccagttttttaattgtcatggatacacctgcgccctcgcagacgataatacatcctgcctccatctcgatcgcgcagagctgtgactcataccggttgcccaggattaccagatcatgtttctcaatgtagtattccatcatatccgggtttgcagcggcaatcagaacctttccttctttgaaatattccctctcatcgccaatcagcatcgccccttccagggtctcgataatattcgtatactgggtacatgccttcgagagaatgctgctgtcatatacattcatataggagcgcgttatatcccctactgtgatcagcccctccagcacattgtcctctgttacggccggaatcgtcacaacaccggcgtcctgcatcagattccatgcttttttcagggaaatattctttgctacgccttttgtctctcttatctctatgtcctttacctgtgttttaactgtctgggtttctttcggagctgccatcccgaaataatcaagcacaaactgggtctccgaattgacgtggccggcccggcccggcacatattcccctccggatgttatctgcttcaaattcgcgtaacagatggcagagcaaatggaatccgtatcaggatttttatgcccgattactatggtctttttcgttttatcaactgtcatgcggcctcctaaaatttaatagtcctgtcatatctattcaaaattgtctctttcttactgtccccgtcacatatgtgaacggtaacctttctttctcaggtatttttcagtatagcacatttgcagtataccgaacagctacctttttgtattttttacggttcaaacggtgaaagagacgctttcccggccttttaacgccggcttacaggaaggtcaggcagaaccggccggatattccggctgctctgcctgaccttcttctgcggctgcttaccattctgccgctttattcggttgatgccgttccccggcggatgcattgcatgggtaaagagcttttaagctatttacggtccgccacggtatctcattgcttatttgcacctattcaccgtttggctccggttctttagcgcttacttccggttttttaccgtctgttttcggctctttatcgtccgtctccggttccttcccggctgtttccggctctttatcgtccgtctccggctccttcccggctgtttccggctctttatcgtccgtctccggctctttatcgtccgtctccggttccttcccggctgtctccggctctttattgtctgactccggttcccttccggctgtctccggttctttattgtccgtctccggctctttatcgtccgtctccggttcctttccggctgttccggactctttatcgctttcctccggctctttgttatcgggttctgccttattgccgctatcctccgtcttatcgactgttacgtcgggttccggttctttcgcgggcggtgaaacattttcgctcgggacagccgccgcgccattattgtctggctcctcccgctctgtaaccctcccattttcatcggtgtataccgcaaaactcagttcatcatatccctctgcttcaatggttacggtgttttcttcttctgtattaaatccatttatgctgaagtcgagatattttaatccgccaaaggattcatcctccgacaccttgtatttatcctcatcatttgaagaaattgaccagctgctgtattcgtaggtccgtccgttcacctgtatctctgtcttatcttccttcttaagtattgtcagatatgctgccaattcttcttccttcagattcttaaaagatacacgataatattttccgcctaatactgaagttttaagctctgccttctttacatccggcggagtcagtttatcggacggagccggtccgtcttctcctgcaatcccgccgttctcatccagagtcactttgaagcttatgtcttcgtagccctttaccttaacattaaccgtattatctccttcaccaaagccgtctttgctgaaatccaggtatgtgttgtccgatacggtgtatttctgtttgtctgccgccattatcagccaggagctatattgatatttttggccgttcacctcgatttctgttttgtcattgtcagcaagcgccttcaggtaattccgtaattcttcatcatttaagccagtgaatgatacccggtagcatctgctgttatagagcgacaccggctctgcctccggagcagtcagcaagccggccggcggttcctcagacccgctgtccgtaatctccccgtttttatccagataaacatcaaagttcaaatcatcacagccctctgcttcaatcgttacggtattctttcctgccgtaaaaccattgatgctgagatccaggtactgcctggttccatttgtctcgttatcggatacggtatatttatactgatcgcttgttcctatggaaaatccgctgtaggtatatttttccccattcacctgaactgccgccttgccgctgtcctcaaagagcttcaggtaattctccaattcctgcccggaagctgctttaaatgatacgcggtagtattttccgttgagtaagtccgattttttctctactttatccagctcaggtgcggtcagtgtttcgggaggattctgattctcttctcccttattaatcctgaattccagcgttttaggcgtgtaatcttccgaccatacagttaccatatagactccggactctttaaaaagccctttctgaagtacaaagccaaatttaccgggaatatagttatcgtccccaaacagtgaaccttccgtatcggaagtcactttccggctgcttccgtccggtctcttaagctcaattcccttcaggttcttcatgaagtctcctcgcagcgtgttctggctctcatccccctctctgcaggccgcaatcacatgcacgtcctggccggtatagtatgccgactcatcctccgcgccttctttcgccgccgggttcggatccgccagtgacagttcaaactgctccggtgttttacttatatgaatctgtgccacagccgtctggtatcccccggaaaccactctcagctcatgaactcccgccgttagctggacacttcctcctgctgtcccctttgttgcagaatagatggtagcttttcccgtctcctcgtcaaatagatatccggccagatagctgtcgcttcgcagggcaatggcgctgccgtccagatagaactttgtatttttattcaggtatgacggatccgaactgcagctcagcacgagatcttcccgaatgctccgttaagaccttcaagccggggcgcccgtttccccgtcatctcagagaacaggaatgaagagccaagaagtccgtcctctaaaacacgtttcacctgatacggacggttttcggtctttccttggccgctgtctgcgtaccggcggaaggtgagcgccgtcccgtctccgagtcccgcatcctttaccgcattcaaatacgcagtaaaatcatacagctcctccgcattctcatccattaccgctaccgggctctgtgcctcccagcgcgcgagaacggcatcggcatctttgtttgtcattccaagctttttaagtatcagcgcattggcaatcagatcatggtcaaatatcaggaatgcgttgatactgccgcccccggatgaaccggattcccccgatgagccggatgaaccgttccatgatgcgccggaaaccgcatcggctccggaaaccgaactgccggaacgtttaccaaataccgtaacggcagaaccgatctcaacggatttcatcattgtcttgtacccgttggcgtaagctgtaaccgtatatattccggcttcatccgtgacaatctcttccttcgtattagtgccgcagatgtggagcatatttcctatctcataccactcacttatattttccagctcttttgtctttccggacggtgtggtcagctgcaccctgtaaatcggggacaggatttcatttccaaacgccgctccgtcttccccctctattgtaaaagcaaagcactctcccggctcaggattcaggttcagcgtatttagtttcattgtaaatgtcctgctgtcaacaaggtgaaccggcaccgtcatcgctgcgctgctgtatccggataccagatttaactggtagcggcctctggaaaaaagatttgtctgcggaagactgattttcagcacacccgtttttccgtatgtattttccgtggtcttcctgaatgccagttcactgttaagaatcctgttttcctgatccagggcctttattgtcttgagtttgtcaaaccactcttcctgatcctttgtcttaagtgaaagcttgaccgtaatctcccctgttcccgtcttttgatcaatcagagtatccggaacataatacgcggcaggcgtctcctctgacgcatttcctctccggtcgctcagatcaaatgtggttctctccggttcggtcctgacctgcccgttcttatcatagacgtccagataatagtcaaatcgtgataccggtccattcgtaagtattgcttttggcgcattggccggatcaccggcgtcaggcgctttcgacgcggctgcggctgcaagcttcaccgtctgctctctgccgtcactgtctcttgtcacggtgacggagcccggtttcagcacagtgctttcccacttcacaaccgaaccgtcatcatctactttggtcagtgtgccggttacatcagtgccgtctatcctgactcgataatcatcaatatttccatcttcaaatgtaatgacggcatatcgcgtccatcccagattcagaaatttcgtcttattccggtcaagtaaatcgcgggtttttccctcgtcaccggtatttccgccggagccgttctgatcttcccctcccggtttaaccgtattttcggagctgccgcttcctgtaccgctattcccggtattgccgctcccgctttctgtaccgctacttccggtaccgccgctgccggagccggagccgccggaacctgagctgccggaacctccgctgtttaagcttccgcttccggaatttttgttaccggaacttctgcttccggagcttttgcttccggctacggctgctttcgtattctgaacggaagaatagcctctgcccggctcgtaatgaacacttccgtccttctcaatccatctcccttccgcatctgttaaaaagcctcccggtgtttccctgccggcatacattctgcccttttctccgccttccgccgtctcaaagaaatagcagtggccttctatccattgccagcctgtcagtgcagatcccaatgattcgtcaacggaagtatttaaaaaataccaatgtccggacggatcccggaaccagccggtgcgcatctttccttccacgccatcctgcgcggtattcagataaaatatatgtccgccgatgttctgccacccagtccgcagtgaaccgttgccgggatccagatagtaccagcctcctgctgtctggagccatcccgtccgtaccgctccagacgaatcataatacttccatgttccgtctccaaattcccatcttccctgggagagagcctcctgtgccggccctgtcggagccgcccacgccgttcctgtctggaaggtcatacaagccgccgtcaatatcggaacgactgccctgctcataaactttctcattgcctttcctcctgtctcctctttagttagtttatgctaaccatattttacagtttagcattggcaatatttggttgtcaacggtattgattagttcaaactaactatttttctcaatactatgtctttcaatgaaaagcatttgtccgcaagacagacgattcttcttatctttcataatctgttaacacgttgttcacaatctattcatatatgatttttatactaaaagcataagaaatttcattttttctttacttttatggtgattttgcacatagatttttcataattgccccggcagcctagcggctccggggtctcctcatgtcatatgcttttatacagaacttttccgcccttaattgtttcaagaacgcggattttcttaatttcctccggcagaaccgtctgcggactggccgaaagtataacaaaatctgctgtttttccaggttctatcgttcccttttcgttttcttccccatactggtatgccgcattggatgttaccgcttttaacgcctcatagggggtgactctctccatcagtcccatcggatgtccccgctgctgatccggttcaccgcacaccacaccgtttccagcatatcaggctgaattaccggggaatcctggtgaaaggtcacattaacgccatcatcgatcgccgttcttgccggactgattttaagagcgcgcgcctcaccgaaattttttaaatgcacatctccccagtaccaggtatgggcggtaaaaaatgaggccgtaatggaaagccgctccatctcctttaactgatccggccttaccagctgggcatgaatcataaccggccgtgtctttgccggatcctgaccggttgtatctgccgccatccggcaggcccctatcatctgttgtgcggcggcatcaccgttgcaatgaaccagaagctgccttccctcccggaacgccgtctcaaaataggactgtacctctttgtctttaaatatcggataaccgcagtatccctccggttcgccttcatatggccggctcacccatgcggttctgccctgcggggagccgtccagaaagatcttataaccgccgatacgcagatggttgcaataggcccctgtataggcagggttctcctccgtcagttcatgggcatcgttcagtgcggcatacgccaccacatccgcgtgcagcaatccctgttctgccgcatatttcaggagcttccattcttcttttccggtccgtccatcctgtatcgttgtaattccgtgttttagataaagctgttcagctgcctgaagctgtctgccaagctgttccgttcccggttccggtattaccgaggatgcaccggtaaaagctgtctcttccagataaccgtccggctctcctgtatttttgcctcccgcacggccaatccggcctcctgaaggatctttggtgtctgccgttattcccattttttcaagcgcaagggaattggcgacgcccatatggccgctggcatgtgtcaccatcacagggttttcaggaaatgcagcatccagtataaaacggtcgggatgccttccctctttcagattattgtggtcatatcccgttccgataatccagtcgccgggttccagctttctctcttctttaaaccggttaagtatcccgataattccatcaaagctttccgcctcctgcagcacggcaaaggataatacacgcgccacagcggtgatgtggctgtgggaatcaataaaagcagggagcatcactgctccctttaagtcctttaatataggtgtgtcctgatgtttcccgctttccgcagccgcctgcaccgcttccagtgagcctactgccagaattttgtcattctccgtcaatacagcctccgctgactccggttcactgcctgacattgtaatgattgtaccattataatataaagtcttcgccataatatatctcctgtctgtatccggtgttcacggcaaatgcgcagacctgtctgaactgctgccatgattctgtatactgttatctcttattatgctcagacctgtcgtttgttaaaccgtttattgccggcatgaatggcccgggtaccgcaatcagtccagaatcagcctcgctgcgccgtaaattccggcgtcattgccaagcgtggccagctcgattcccgctttgttttcggaaatgggagtgtactcctcatagtacttgcgaatcatatcagtcaggaaagtacctgcttttgaaacgcctcctccgataacaaacacctccggatcgaccgtcatggacacaattgcaagcgcccagcccagataataggaaaccgtctccatgacctccattgccagcttgtctcccgcttttgcacaatccagcacgttttttgctgagattctgtctccgaatttacgcatcgcagaatcttcaccgctctgcttcatcattcgtctcgcttctctcgcaatgccggtcgcggatgcgatctgctccacacagccatatcccttacagttgcactgttccttctcaccctcgcggatacgcatatgtccaatctctccacccaggccatgtctgccggggatgatcttttcatcaatgataacgccgccaccgacacccgttcccagtgtcaccatgacaatatcatgatatcctttaccaccgccctgccacatctcaccgagcgccgccacgttggcgtcattgcccgtctttaccgtcataccgtccagcagtccgcttaagatttcctggggattcatctcacgccatcccaggttaacgcagacctccacaaagccgttcggaagaaccgggccggggattccgagtccggctcccgccacctcgttcagactgatgttctgctcattcaaaaccttcctgattgacgctgcaacatccggaaggatgtatttaccgttctcttcttttctggtcggcacttcccactttttaaccagtgttccgtccagctcgaacattccaaccttaaccgtagttccgccaacatctattcctatacactttttacccatgctccggcctcccgcaatttttctaaatcagttttattataaaagatgcgtttgcagattgcaaggtggtttagttgaggttgggaggacgcggacggggacagatacacctggcggagtctttcggcccggcagcgccctcacccgattaattaatctgaatcccttttacagccgccacaacgttctccaccataaatccaaacttctcaaacaactgcggcgccggaccgcttgctccgaagccgtccatggtcaccgtctttccgtccagtccggtgtaccgttcccagccaaagccgcttaatgcctccaccgcaactctgcgtctcactgttttaggaaggacagactctttatactcggctgactgctcttcaaataagtctgtacacggcatggatactacacggacattcatcccctctgccgccagcacttccttggcctttactgccagagctacctcagatcctgttgcaatcaggattgtgtcaggcgttccgtcacagtcgtctatgatgtagcctccctttaaggcctccctgctgcttcccgccattggttccaggttctgcctggtcaggacgagagccgtcggtgtatgctctgaggtcacggcgctgtaccaggccgcctgtgtctcagtcgcatcacatggccggaatacatggaagttgggcattgctctgagcgccgccatctgttctaccggctcatgggtcgggccgtcttctcccacaccaatgctgtcatgtgtgaatacgtaagtaagcggtgtccccatcagtgcggaaagacgggccatcggcttacagtaatcactaaacacaaagaatgtggacacatatgccctgagtcccccatggagcatgatgccgttgccgattgcagccatggcaagctccctgacgccaaagtgcagattgcggccgcttctgtcttctttcgaaaaatcacctgcgcccgacatcgccgtcttattagacggagccaggtcagccgaccctccgaacaaattcggcatgacatccttcagatagttaatgacagagccggaaatagaacgcgttgcctctgctttttcctgccttttccagaactgcccgtcttgatccagcacttctgcggcatgaacgtcataataccggttccagagttcttccatctcgggatattcttcacagtatgcggcaaacatcacgttccaggccgcttctgtctctgctttctcctccgcgatggcagcaaaatgtttatatacctcatccggcacatagaaaggttcctcgtatggccattccagagtttcccggagcgcttttacattctccgcgccaagcggctctccgtgcgcgctggctttgccctgtttcgccggacagccgtatccaatctgcgtcttaatcgtgataaatgacggacgggccgtatctcttttggccgcctcaatcgccatgccgatggctccggtatcattgccgttctccaccgtaattgtctggaaaccaaaagcgcgcatacgctcttccacattctcgcaaaaagcaatatccgtactgccttctatcgagattcgattcgaatcatagagtacgatcagctttgaaagtcccagcgttccagccagtgaaaatgcctcggaggaaataccttccatcatgcagccgtctccgcccagtacataggtaaaatgatctactaccggataatcgtctttattaaatacagattccagatgcgcttccgccattgccattccgactgccatcgccattccggctcccaacggcccggttgtcgcctcaacgcccaccgtatgcccgaactctggatggcccggtgtcctggaccccagctgcctgaagttcatcagatcttctttagacagtccgccgtatccgaataaatgaaggagggaatacagcagcattgagccgtgtcctcccgacaacacaaaacggtccctgttagcccagcctggattggccggattatgattcatctgattggcccaaacctcgtaaccgatggctgcacagccgagcggcagtcccggatggcctgaatttgccttctgaatggcgtctgcggacaaaattctgattgaattaatggaaagattgtcaatctggttcatttgtaattcctcctgacttctatttcaacgtgatctcgcggatcctgtctccgcctgtaatgattaaggtattgaaccgtgatcccctggtaattttggataccgtgaaatcaaactcgccggagaagcgttctcttcccgacatgtcatagactttgcacgaattatcattatacaaaaatacaaaatcaccgtcaatatcaaggttctgatacagataggtaaattccctgctgaaagcaagtgttccattcgacttatacacatccagcctgttgtcgtattcacctgacggagcgtttacgacaattgccacatggctgtcggaataggcgacgctttggatctcctcttccaccggcacctgcttaaccagttccggggaagtcacattcaccagagagaaaaacgccaattggttgtccgtcaccgcacatgcgtgatcttcgtcgaaaaaccgcaccctgggacacaagctttccccaaattcttcaaagcctcccacgagacgatccggatagctctttccaaattcggaaaagttataaaatacgattctgttctttaaagtgctgtcctggatatatacgtccgacagcataacctgtgtgccttccggcgacagtgatacatccatcaggtatccgttcttcgacatgaccgtcttgatgctccagtccagcatgcttccgtccttcttaaaaaacgtgatataggtcgatgtactgtcctccaccagggcggccgccaccccgtaagcagacacactgacccgcagaatcggaagcagcgttgtcgcttccccctgcaatcctgtaatatcacagatataaagggaattgccctgctgatctcctataactgcaaaattgccattcacataacataccggtgacttcatctggtagcttaacgaccacacagcattacccgacttgtcaatataagatgccccgtccttactgtatttgagcagattttcaccaaatttcatatacccggtaaaactgctttcactggcaggaatctccttctcccaggcaaccgtatattccatataccggtgtccccggacatagcgtaccgccagaaatacgagtattgccgccagcataatcaggataaggatcagccgcagcctcttaagccgtgtcttgcgttcggctttacggacaatttcttcctcattatcttcctgatgtttcccgggccttccgcccggagcggagcccggctcgacgatacggcgttttaactgcctctttttttgttctcgttccatcgagttcatattactcatcgtttatctcctgtaaccacaatggttgctaacaattatacactattttcaggagatacgcattaaaattctttcttaatacactttgccgggttagatttcgtgttactgtcacacacctattctccttccagagcaggaagcaccagctcctggcccgcaatgattttattaacatcatccaggttattcagggcgcagatgtcctcgagataattcaggttattgtagagtttgaagcagattccgtagagtgtttcaccgtccccgataatataggtcttacccggtttcatatttgtcaccggatagtccttgattgccgttgaattgcctccgcttccgttctgcccgctctcctccgatcctgtgccgccgctctgggacgaagcgcttcctccgccgttttccggctttgctccggaagcctgtccgtctgtcttggcctgtccgcccgtctgggcctgtccatccgtctgggcttgtccgcccgtctgggcttgtccgcccgtctgagcctgtccgtctgtctgagcgcctgtcaaatcggcagcgccgttctgcccatctgcctgggtctgtccttccgcctgcgcccggctctgcgctgatgccggttcctggcccgcggtttcccgtgcctctgactccggctgcatctctcctgccgtttcacttcccggaatcgccgtcttttccacagactcaccactgttcaggacagactgccctgtttttgcttcctccgccgacttttccgtcggatacactttccctttaatctgctctaccaccagattatcatcgtcttccctgccgatataattctccaggcccttaacgccgcttggcagcacggaaaccagaaccgtctccatttcacgcattttctggtagttgttaaacatgacaacaccgccggcaagcaccgctaccgacagtacactgcaaagcatccccagcgtttttatcgtgccacggcgggacgcggcctctattttccggccttccatcctctggcggaagtcgcggatcaccctgtcgcctccgcctgtttccacgcgtcttacgtctttgcggagaatcatatagtcctgcatcatctggttgcgctcgtaatagacactgtatcccttcagacggtaaaaaccgtcgtcggaggttatgtacgcggcctcttcaccgtcgattccgctgtttaagtacatcaattgattctttccgccaaaatactgggtatgctgcttccaataattaagaggactcaaaatacagccgggcgctccgcaaataaaccacccctgtacggtcctctttggaaaagtttcttctatgctttggtatgctttcttccaggcggcttcggaaaaaataaccttttcccctgctgccgtcacatcttccatctcaagcgccccgtcaataaaaatgtaaggcactccttcgtaagtttccgtgctgccgagtaaaattccaactctcagatcttgtccgcccgttggatacagacgtttcagatatgtatttacataatcttccacgtacagcttgaccacatcatccctgtcaccgatctgcctgatatttttcggcagtctggggaatggattgtataattctcccatagactcaccccgctatcgttttattaaatctaagcgatcatagcacaggttctatgagaaacttgtcaaacaaaggctgtgttatcccagaacttttcgacaagactgatgcttctgctgatgcagtccgccatctgcatgactacggacagcctgacgctttgcagcataaggggatcgtaattgccgcagcttcccacaattccggtaatgaatatatcccccaccgaacgcagctccttgctcacgccaagtcccggtttcagcgccccttttccaagcgttacatatcccacatgctcccggtttcccaccgaggcgtctaccgcaacaatcagatcatcctgatagcatgttctcagaacagccatgtaattctccaggttcatcgcgtgtaccggacgttccagcgttccgaaaaccgtcgcctttgatattttcatttgatttaatttatatccgatgagaggccccagactgtctcccgtggagcggtcggttccaatgcacaggaatacgattccccgcttgttcttccgctccttctcctcctggatcatttcaaacagttggccggcaaattcctccggaataaaattacgggaagcattatagtaataaatttcctgatcattccgaatcgtcttccattcccaaattttcataatctaccgcctgtcttattagttaattctattataaacaggcaatgtaaaaaatatgcaggggatattctccccgcatattactttctcgacatatttctattcttatatacttctatcgcttcactgatattgccggcttcccctgattccaggatccgcctaagctcctccagcctttccgccgtcaggaattccttgccgacatagctttcataggtgtccgtgataaaaatcttcttttctttaacaatggtctccgtatatctgaggcggctgcccgcatcctcataagcagcctgaagactttcgatcttcgctttgctgttcccggtgatctcatcggcaatgatcattttcgtcacattttcaaaggtattgagcgcctctttcttcttgcggattgtctgggccatctcctgctcaagctgtgcgatctcatcatcaaatttctccagattataaattgcctcgttccggtccctcttaatagaagccgtgataacacggatttttttattattggagttaatcaggctgcggatggaacgtccttcctgcagcgcactctgatgacggccttttgtggcatttccgacaaccgtataaatcccgccgaagacaaatatcgcggccacataaatgaggaccagatacagagtctttttgtcgggaagcatggaatatactccatacggaaccaggagaaaacagactgcgaatgtcagaaggaaggtaataatctccctgaaccccctgggaaaatagagggcgtaataaaatccgctctgacaaaaggagggcaccctctgagactggaacagtgtcttcatcctgactctcagctccctgttatgctcatggagctccaccgtctcttcctttatgcggtccttcattccctggttttttgccttctccctgcgcgccctgattttcttcagcttttcctggagttttcctatctccgagtcataactgctctccatctcttcgcgacgtttcttcacagtcatgctgatggcatcctgaactgctttctgctccgcctccagagatttttccagccgcagctcctccatcctgagctgttcttctttcttcgtgaaatcagaaagctccatcaccgcctcttttgcatcttccagaaatgacttaaagtctgttatcgtctgtgccataactacctcccggatagttcgttaattgtctattttgtataattatcaaaatagccctgaatcagaactatcggcgtacccttgtcgccgcttcccgatgtcaggtcgcagagagaaccgatgagatccgtaagccttctcggcgtagttccctgggaaaccatatttcctgtcagattttccgccttctcatccttttccctgatataatctgaaatagcgctcttcagctcttcgccggataaatcggcaaaatcgttgtccgccagatattttaacttcacttcattcggcgttccctcaagcccgtctgtataagccggggacactaccggatccgccagttcccagatctttcctaccggatctttgaatgcgccgtctccataaaccatgacttctatatgtttaccagtgctatccatcagctttttctgtacattgcgtacaaactcgccgcagttaatcggaaaaagcttcacggactcttccgtcgccttgttggaaccgagaaggccgtagctgtcattgtaaccgcttccatccacactctttgtcaggatctcatccagggagataaccttttcggcccctgagtttaacagcagctttttcgttctggcccttgtatggatatcacagtttaacacagtctttgtataatcaagaatcgctttcggattgttggcaaagatgatgcttacctctgctccggcatcctcaatcagtttcttatagtattccacataatccacaccggtaaactggtgttttctgtagccgaacagttcgcggtacctttcctctgtcagcacatcgctccagggatttactccgctctcgtcaagctgttccggggtaatcagatggtttcccacttcatcagacggatagctgagcatcagaaccacctttttgcagcccatagcgattccttttaagcaaatggaaaaacggtttctgctgagaatcgggaaaataatgcctaccgtatcatctcccactctgtcatgcacatctttggcaatctgctctatggttgcgtagttgccctgcgccctggccacaacggcctcagtcacagccactacatctttatcgcgaagctcaaagccctcactctctgctgctttcagtacagaatcggccacaatctgaaccagatcgtcaccctgcctgataatcggggcgcgaacgcctctggaaaccgtaccaatcagtctttccatcttccattcctccatacgtataatgtttgcagccatccggtaatcccggagaaacactgttttccgaacaactgcctttcatcttattttcagctcccttacggggattttcacaagaataactgtaccatattttataagggttgtcacgtcctttgttagcattatatcatcccgtccgcacggtacggcgggattaaaacgcagtgtaacagttcagcctgaatctcatgttgttggagatttagttaagcaggtgaggacgccgccggtacggccagcggacggggtggtgaggtgtgtatatgagtctttcgtcctgggggtttggcatcgctggatggagaaggagatactgtggttttgttttcgcagggcggagccggagagaatgatatccggctggactgcttcttcgagggatagctctaagacagaggaaggcaaagcccccggggttacggacaaattcgctccgaactccgaatgagttcgaagctcaagttgtcccggattttgcccttgtagggctaaaatccgcccggcgcgctttgtctccctctgcctaagagctatcatctctcgggcgaacgtccttccggatatcattctctccttctccgccggaagatgtcggcagtatctccttctcccggaaggttttcgccggaacgaaagactccgccgggtgtatcggccccgtccgctggcctgcggccgctgagtgtctcacgcgttaagtgcgggggcggaccttgtcgaggccactcagtgctaccgtgtgtgggaaatacgatatgccttcaatacgccttttataaaaaattgtggaggatatgatatcggcctgccggaaacacgtagtggccgcgacagggccctccccatttaaggttggagacaatcagcggccggagcggaccatgtccggtgtgcgaaaaccttcgcctgagtcttccgtccctggcgaaaccctgaccgggggaaggaggcggaatcaattctgcaggggatatggaagcccatccgtgcttaatgaggtttctcacgaatttagcacggctatgcgcttcgaaaagtgcaaacggtccccgtaagaattcattccggccggattcccacctcacggcaaccttcaaccagggacggaagactcagccatccccctcaccacaccggacatggtccgttccggacgcgtcctcccaacctcagttaaatctccatatttctctcccccgctctggaaaaacagccggtgaaatgatacaataaaacagtattttacccatttgcgcatttaacaggaggcataatgaaaaagctggccgtcgtcgcttatcagaaacacacaagagaacagtatgcggaaacactcagggaactgttcggagattccgcccaggtggcatattattccatatacggcaatgaactggaaaatctggatgcagatatcgtcctcgcttccacctatacggtctgcgagctgctgaaacaatacgtacccgactatgacaacatcgtcatagccaatattacgctgcgaaaggattccgtcgcccggctgcgggccgtccctcccggaacgcaggcgctgcttgtaaacgtgtcgctccaggacgccattgatacaatttctctgatacacaggtgcgggattaaacatattgattttgcccctgcttatcctcctatatcacaggctctttcctgtgatatggccgttactcccggcgagatggatctcgtcccgccctatgtaaaaaatgtcatcgatctgggtgaccgcgtactgtccatgaaaacaatcattgaaatagccgtccgcctgaattcaatcgagctgctgcacaaacctattttccgggaatattttgacagcattatctctaccgataccagcgtacacggaatgctctaccagattaattttcttgaacagcagctccagtttgtcatgcaggtgttcggatccggaattatgagcctgaatgaacacggcaatataatttttgtcaatgaaccggcggccgggcttatcggccggccgccgcagcatttattcaaaaagcatctttccatggttctgcccggaatctgggaagacgcgtccatgaccgccgtaaaagacaaagtcataactgtgaattccaacgtgattattgtctccgttcacacgatcgaatatacttccgtacagcacggctatatcgtccttctaaaaaaattcactgatttggaacaggagcagtataagatacgcaggcaggttatgtccaaaggccatgccgctaaatacacatttgacgatatcgtcggcaacagcctggtaatccggcagactaaacaattagccgggaagatggcgtgctctaattccgcggtgctgatttacggacagaccggaacgggtaaggaattatttgcccagtccattcacaatgcatctccccgcaggaattatccgtttattgccatcaactgttcggcgataccggaaaacctcctggaaagcgagctgttcggttatgcggaaggcgcttttaccggagccagaaaaggaggaaaatccggattctttgaacaggcccacggcggaacgctcttcctggatgaaatcagcgagatgaatatccatctgcagacgcgtctgcttcgtgtcctgcaggaaaaggaagtcacgcgcatcggcggcgactcggttatcaatgtggatgtccggattattgccgcctccaataagaaattgaaaacccttgtgaatcagtcggccttccgcaaggatctctactaccggctgaatgtgctgagccttcagattcctcccctcgaggagcgcagggaagatattccgcttctgcttgaaaaaatgaaagaagaactgcacgccggttataccctcgctccggacgctatggaactgatacaaaatattcattttgagggaaatatacgtgagctgcgcaatctggcggaacgcctcaactactcggatcagcagtatatagatgcgggggagctgaaacgttatctggatcaggatgtttacggggacgagggcgcgaaccgacaggagacggaacttctggagcagtttttgtcggaaaattcaggacggctggaccggatcctccctgtcctgtctgttattaagcagacggaacacagccgcctgagactgggccataagaccgttttgaaagaactcgaggaccgcggcctcttcttttccgaacaggagatccgtaccctgttccagacgcttgccttttaccgcctgatccggattacgcgcggcagaggaggaacctgtatcaccggcctgggcataaaagcttataacctcatgatggaaaaaggagcggctcagacagagtcgccccaataacggtagaaaaagttttctgcattccggtagcagatgagttccgcctgacgttcggaaaacccgttagccaccatggcttcggttaatttaccaatatcctgtactccgttaatctccagctcgatatccataccgtcaaagtcggcgccgataccaagtacctcttcgccgccgacattgatgatatggcggcagtgccggattatatcggagatacggctgaccggatcgtccgagagaaaatcagagtagaaattcactccgattattccgccgcagtcggcaatctgccggatcatcgcgtcactgagattacggctgacggcgcgcaggctgcgtgcgtctgaatgagtggctattacgggcctgcgcccataccgtataatatcctggaacccttcgtccgacaaatgggaaacatctgcgacaattcccagctcatccatccgctctaacacctcaaagccaaacggttttaagcctctatggccggaatgcggggcattgtggggatatcccagacaattctcgtgattccaggtcatgttaatcacgcggattcctttctcatataattcatccagacgttccatacggttttcaagaacaccgccctcctccagggtcaggaaaccggacaatatcccctgcttttgattttcggcataatcctgaaagcttcctgcaaagcggactttatcctcatatccgcaggtctgctggtaaaataaatctatcatgccgagtacgtcctgataatggcttcccagacgcggttttttggcaaggttcagaaagcaggcaaacatttgggccgtataaccgctacgccgcagatgctccagcgacacatggcagctattctcccataaatcgcccagctcacggttctcctggtaaaacaggcggtacagagtatccgcatgaaaatcaataaatttcatttctccaagctctcctcatctctaaaaaataaagttacagcgttgcgttaacgatacatgtacgctccgcgcacaggtcaccctttgcgcaatcctgtaaatagctccctggccgggaaaagtccgaacaggccgcccgtatgcaggaaaagcacatttttacttccggcaaagcttccttttttgacttcctgtgtgaatccgtacatacattttcccgtataaacgggatctaataatacgccctccatacgggcaaaatccctgataaagttaagctcttcctgacggctcagagcatatcccctgcctacatagccgtcaatgatttccacttcttccggccggattgcgacaggctcctccagataagcgcccgcttcctccactatctctgaaacacgctgccggaaaaacggagcgtcgtcacacacattaatccccacaacgcgtttattaagcccatacagccggttggccaggcagacaccggcgaaggtgccgccggaaccgactgcatccacgatggtatcaaaggtaacgccaagttcccgttcctgctccatgatttcctgcatacaggccagatatccgaaggtaccgatgccattggacgccccttccgggataatataagctttacggccggctgcggcatattcggcggccagctcttccataatctcaccacgcctcgaacggtagctttccgcgtcaataatgcgcacatccgcccccagaagacagtcgataaagtaatttccgtccacgggcggttccttatcagcgcttctaagcaccagacaggtatttagtcccagctttaccgccgcggctgccgtagcgcggcagtggttggactggaggccgccacaggtgatgagcgtatcggctccctgatccagggcctccctgacggcatattccagcttgcggattttgttgccggagtattccataccggtcagatcatctctttttatgtaaacggaaattcctgtttgttccgaaaaacgttccagtttttcaatctttgtcggcagattggctaacggaatcttatttggaaaaggtttcatgattttattcctcctgatttataatacaaaatggaaaaagcggagaacctcatagtaatcattcgattgaaagccgatcgtatgaggatccagcctgcacgctcccggatagtacgaagagccttccgcatcataatgcttgtggtacgacaccgtcacgtgaaactcgggggcagtacataggtatagcgatccggattcccttccagcgccttcctggcggagtcttccagcattttctccgccttttccggatgcagaccggcaacggccgccccgattcctcttttcacagggcaggccgcaatcagcggattcagcatctttgccttttcacagattgcctcatccccggaaacaaaggccgtgggtattccgaggtaagtacatgcataagaaaagagcatcagttccgacgcagaggcgccgttaatggtaatctcccggatccgcctgctgctgatcgtgtgcgccatgggatttcctccctggccggcgccgtcgtgatatcctacaaacagcacggcgtcatagctttcatcgatgccgcccaccatggaataggggtttctcacttccccccggataagggtgaccggctccggcaggtattcatgcatgatattaaggccgtatccatgcgaatcctttaccgccacaaactctgccccggctgacagagcgccgcggcagactgcgcccacttcccggctcatttgaatcatccctctggtataaagctgcggattttcgttcccggcctccgcaaaagaggccagatccgcggttccttctatatctgcgctgacgaatactttcattttccttctccctcccacggaatctgacaaatccccagtatttcatgcttagtttcgtattccgagcttctgagggcgcgatcctcatattcacattctccgtactgattgtcggtcggatcctggcgcatgaattttttaggcggcataaattcgtgctggaatgcggagttggctggcattcggaacggatccagattaccaaaataaaattgccgtctctcctcattgcctgcgcgtctggaactgccgccaaaggacggatccgcaaagagccagccatacggcgcaatatagaactgtgcccagtcgtgtccgccgatatcgtacggcgcggcaaacagccccgactgccagcgggcaggcaccccgccgtaacggcagagcgtaatgaaaagaagagcctggatcccacagtcccctttctggtttatgcctgcatattcaggtatattctcaataatgctgtatttgcgcacataggaataccgtatgttggaagtaatatattcataaattttttttgctttcagaagcggattcgtttcatcccccaccacgtcccggtacagactgcgtatgtacggagtaaacatgatgtgaggggcctgctcttccagaaagaaaccgggctgcaccgcctccactttttccggatccggcgaaatgtaagccagatggttttcatattgatactctactgtaaactcgctgtctttttccaaggtcccctgaaagcagaccgtacggctctcgaaatcctcgggtgaggcaaaagcgccggagggaacggagataagctgaatattcctgacctgtgttcccgcacagggaatcggcagatggacggtaatccggctgcccacgcgccgggcctcttctttcaccttcagggttgtgcggatcctgatgagataggcattcccgcccttctccttcatggtgcgcatattttcattgagaaccgtctgctttaactgcgcgtcaccggactgctggggcgccgacagacgggcggtaacaggatgctgtactttcagcagattatcataaaacgtgcggataaaatgcatttttccatccctgtatatccagtcgaacagcccttcgtcaatgtatttatcaaattcttcccttgtaaaaccgctgatgttttcgctgaggatggcaagagcctcatcgaaggagtacgggtaatccgcttcccagaccggaatcagctcccgctccagctccagtctttttctcagcgccaggggcaggttccctctcaggcgaagttcaattagtttcagcgcttcggaaaaatatcccgcatctttcctccttctgatatcttcaggcagcggtactgccaaatatggcacatgatccaacataattaattacctccctttactagagcgtttcgaactggctgaaaagcgcgccgaatccgcctgaatggagataacaggcgcttccgtcaatgcttcccttttgtatcaaatccaacatgccgtaaagcgttttgctcgtataaaccttttctacaaagatgccctctgttcgggccaaatcgtgtatccagtccacggattccggggtgggtatgccccatccttcaccgcggtattcttcatgtatcgtatacaaatcatcaaaggatgcgcctgccagacttccggtaagctcctgcaggtccctgataaagccgcataaaatttcctgcagctcctgtttttcatgttctaccgttacaacatgcacgtgaaacggagcttccaccagagccgtgccgaatatcactcctgccgccagtccgccgttcccgcccgggacgaacagatgcttaatctctattcccctcccggcacactgttcacacagctcgacaacagcctgtacatagcccagggagccgagcgccgttgaggccccgtttcttataacatacggatgcctgttctgttcctccagttcccggcagaactgctccacatatttctcgcgttcccggtccggcatatcccctataaaccgcatatcggcgccggataaagaattcagaagctgattgccttccgcccgttccggcttttcgtcgttgtgaataatgacgcagtcaaggtctgccttgctgcaggcggagacagccagggaacacagattggactggcatttccctgaggcaattacaacatccgcccttctttgcaccgcatctcccagcaggtattccagatttctgattttgttgcccccggccccagcccggtgagatcatctcgtttaatatagagaggaaacggcgctcccgttttttttcttatattattcatctgatgaagcggagtcggaaaagtccccagctccagacggtgaaagttcgacaaaacttttttcgcttgcccggtattcatatcaatctccattctgccgcagacgcaggcggcactaattctgttaatctgttcaagcgtcttgtacaaatcattccgataactgttactgtccttcaactagatggcaggcaacaaaatggcctttgtgggtttccttaagcacaggcgccagctctctgcaaacgtccttcgcatgaggacagcggctggcaaatttacagcctgccggggaattcagcggacttggaacatctccctccagaagtatctgcctggactgcctggacaggtccggatccgccacgggaatcgccgaaagcagagcctttgtatagggatgctggttgtggttatataattcttccgtctcggctatctccaccaggcttcccagatacatgacgcccacacggtccgaaatatgccgtaccattgaaaggtcatgggcgacaaagagataagtaagccccatctgctcctgcaaatcctccagcatattaatgacctgtgcctggatcgagacatccagggccgagatgggctcatcgcagataataaattcgggacctacggccaaagccctcgctatgcccacacgctgcctctgtccgccggaaaattcatggggatagcggctggcgtgatctttattgagaccgacccgggaaagcagatccagaatgtactcctctctcgcctttcctgaacagatatggtgaatgtccagcggttctcccacaatgtccgccacagtcatgcggggatttaaggatgcgtaaggatcctggaagatcatctgtattttctttcggtaggccataaactccctggcgcttaaatgtgtaatgtcggtgccgtcataccgtaccgttccgtcggttggttcatagagacggctgatagcgcggcccgttgtggtttttccgcacccggactctcctaccaggccgaacgtctcacccctgtctataaaaaaggacacgttatcaactgctttcacataagaaaccttctgcctgatgactcccctcacttttttaaaatacattttgaggttttcaacttcaatcagatgctgattggccacgcttcacaccccccttttgcatttcatacttttctacggccggcgcctgtgaatgacagagccagcaccggaccatgtgatcgccgccggcaggaatatcgggaacctcccgctcacggcagatgtgcatggcaaattcgcagcggggataaaatggacagcctgtaggaggcttcagcatatccggaggggttcccgctatggagctcaggcgttccctgcttcctcccgccttcggtatcgactgcagcagcccgatggtgtaggggtggagcggtgaatagaaaatatcctccaccgtcccggtttccataatctgtcctccgtacattacgataatccggctgcaggagctggcaacaactcccaggtcatgggtaatcaggatcaccgccgtattggtacgctcttttagctcctttaaaagacggagtatctgggcctgaatggtaacatcaagagctgtggtcggttcgtccgcgataagaagttccggcctgcacgatagggccattgcaatcatgacgcgctgacgcattccgccggaaaattcatgaggataacagtgtaaccgttcctccgggtccggaatgccgaccaggcggagcatttctgcagcccgctccatcgcctctttctttgagatcttctcatgctccaggattgcctcgcttatctgggccccgacagtaatcagggcgtttaaagaggtcatgggatcctggaaaatcatggctattttgctgcttcgtatttttcggatttccctcttgttttttttgagcagatcctcgccgtgaaagagaatctgtcctcccgtcactttacccggatgctgaagctgcatgatagaaagggaggttacgctcttgccgctcccggattcgcccacaatacctaccgcttccccttttcggatggaaaagcttacatcccgtatcgctttaacttctcccacgtgggtaaaaaaagaggttctcaggtttttcacctctaataattgttcttccatgaaaaatcacctctctttattttctttgtttcgggtcaaatgcatcgcgcaggccgtcgctgaacagattaaatgccaaaattgtgacagaaatggcgatggcgggcgtcagcatctgataggggtagacataaatcccgggaagggcgtcgttgcacagcgttccccaggaggccatcggagccgaaacgccgagacccacaaaactcaaaaatgcttcggtaaaaatagcattcgggatctgcatggcaatcgcaaccatgatagctcccatcatattggggataagatgcttaataaatatgcgctgtgtggatgcgccgagaattttagccgccagaacaaactcattattctttaagctgagtacctgtccacggacgatgcgggccattcttacccagtaggtcagtcccagtgcaataataatggatttcattcccggtcctatcacgaccatgatgaggattacatacagcatcatgggaactgaatccaccacgtctactatacgcatcatcacattgtccaccataccgcccttatagcctgcaaagcagccgtaaaagaccccgataaggaaattgacgagggcggcgacgaaccccaccgtcagcgacatcctggcgccgtagatgacgcggataaacaaatcgcgcccgagtgaatcgcttcccaggatatatgtcttattcctgagcgtccgcgtctcagtcagaggctgtccgtcatatgtaatgctgcacttgtcaacatcttcctccaggattcttttggcttccgccagcgagacaagcgttccctcctgtccgctgccaaaataagaggaaaggtaaggtgtctttgacaccggtatacagtctccctcggcatccgaatatttcttctccagtttcctgtattcctttagcgcctgtgaatacatgctgtaatcaatcgacagtattttaccgttcaaatcaaaggtgctttttctggctatcgtatccttatagaccggctccagcagctccaccagagttccgtctgcagcaacctcgacaacatcgtaattctgcgtgatatagatattccgctcattggcgtcatccgacagcggatatactttgagaaccggcggaatgttcgacagcgtcagattctgttcctgatagctgtatttccagaaaaaggggataaatatggcgccgagtaccagaataactataacgatcatggacagcattgctgttttattctgtttaagccgtctccatccgtcctgcaaaaaggtcaggctgggtttttcaattttatctgaatgtttttctcctgattccaatggctcccaaagagaggccggaatctgttctgcattattcgtcatcttctctctcctagtcatacttaattctcgggtccacaaagacatacaggatgtccacaatcagcgtgcagactaccagaaatacggcaaaaaacacggtaattcccatgataagcgtataatccctgctcagaatactggttgtaaataaactgccgattccgggaatgccaaatactttttctattacaaaggagcctgtgaccaccattgccaccatgggaccgatatacgtcacgacgggaagcactgcatttctgagcgcatgcctggtaaccaccttaaactctgagatcccctttgccctcgctgtcctgatgtaatcctggtttaactcttcgatcatggatgtacgcatcaggcgggtgacaaaggccatggaaaacacggaggtaaccaggacagggccgatgtatcccttccagtttgccactccaaaggccggtacaagccccaggattttgctgaataaaaacagatacagcgtcgcaaacacaaaactggggatggtggaaccgagcgtggataaaaccatcagaaaacgatctacaaatttgttttggcgcagcgccgccaggattccggctgcgatgccgaagataataatgagcacggaggaataaataccgatccggagtgaatatggaaagcctgcggcaataatctcattcgtggaaagcccgactttgatgtatgagattccaaaatcaccgtgaaggtaatccgccaggtatttcaggtaccgctcatataacggtcgatcaagcccatactttgccagcatggcctgtttgagtgtaacgtctaaaaacttttccgaatccagagggctgcctggaattgcattcattaagacgaatgtaatggtcataataaaccatatcgtgataagagctgccagcaccctctttactatgtatctggccaaaccgatccctcccttaaaagcaaccgggagcgcccgccctgcgggcactcctgatttactgttgtaacagttctgacatcatgaactgttacctactgttatcattaatctacaaattccgcatttctgaataaccagttgccggtcttggaaaattccacattggcaacgacatcttcgttaatcagcgctttaagcacatagtagtagattggacacgccggggcctcttccatcagaaccgcctctgcttccatccacagctcatcgcgttcgctgccctgtgcggccattgcagcctggtaagcgtcttcaaaagctttttgccccggattcaaaatatgatcatggggtgcgctcggatgctccgcatatctccactgcgcataacagccggaatcaagcttaaactgtttcatcatctggctggcgtcatagtatccggcgctccagcccgacaggctgatatcatatttaccgtcagcctttgtctgtaaggctacgctcttatcctcattgcgcagcttgacgtcaatattaagattgtccttccacatctgctgaatcgcttcacaaatcttcttatcactttctcctgtgtagtataaaagctccagctccgggaatccttctccgtccgggaaaccggcttcggcgagaagctgttttgccgtatctacgtcggctgaatcaggagaaattccatatgccggctcaggcaggccgttggcctgtacggtgcggtaagaactgccgtccgtcttctgtgttgtaatcggaagaaaaccgctggcgggaatctcaccggagcgtgtaatctgatccgtgattaatttacggttgatggcaagtgtcagcgcacggcggacccttacgtcactgaccggatccctgtccacgttaaagtccaggtattttgttccggtaagcggggatacgtacagattgggatcctcagccagcagtgtcggtatttcttcggccggaattacctccgtacagtgaatgtcgcccgccttatagccctgcagggacgtattctcatcatttaccataattcctttaatagcaggcatcttaatgctgtccgcatcataatattcgtcgttcttgaccatcaggatatgagagcctatctgatattcggcgagcttgaaagcgccgttacagataaatgtctccgggcgtttttcccagccttcgcctaaatcaacgcacttcttgttaacgggacagtagatatcggcggaaatacggtttaaaaagaacggagccggatttttcaggactacctcaaacgtataatcatccagggctctggccataacctcatccgcggttcccgttcccgccagatactcggccgcaccgaccacgtaatccgttacaccggccgcagaaggagacgcaaccgacgggtcacacagacgtttccaggtatactcaaaatcattggcagtcagcggagtgccgtccgaccagttagattttctcaggtgaaacgtataggtcagtccatcgtcggaaacatcccaggactcggccacacccggctcaataccgtctgcactctgcctggtcagtccctcaaacatcgaaattgttatgtactcggaaagagtctccgagctgagggtgggatcccaggttttaggctcatttcccatattccacaccaatgcttccggatgatctgccgacggttcggcggcaggctccccggctgactctgcggaaaccggagcagatgatgcgggggcctctgtcgtcttctggctgcaccctgccaacaagcttccgagtgctgcaattgctaaaataccggtgaataaactgcgttttttcataaaatcctcctttattaatttatgctgacggaaaccgctcttagtttcctggccatcacttatgttttataaacaagcaatttatatgccaattcctgtaaatttaaatagttttgtaaattattttgtatttttatgtaaatattgtttttatttgttgtttctgtacttccgtcagcactttttcagtataaaaattctcctatatatttaaaaaacggctgatttaccaattaaatggttattaaatataaaataataaccatttaattggcgaatcagccgtttaaagtacagctgtccgaaacaggcatatgcacagaaacggtaaaaaacaccgtttcgcgctgtgcaccgcaaacccgatccctgcctactcttccagcacctggatttccagataatcaaaatcaatcgattcaataaaattatcactggtaaacctggccttgtcgtggcgtttaaattcttcgaccgtagcgtccagccagacaggatggcccaaatcaaactggtaacacagttgatccatggcatcgaaaatcatggccgttctggacatggtatagtcactgttgcagatgaccgcatcctgcagcattctgttatctttaaatatttttccccacaagcggaacatggcaggtctcctttgcacttctcttgttattttatattattatcagccttcttccggcgctctgtccatccagtccctgccctctaccagtcttgtaaccatcatggacgcaacggtatctcccgttgcattgatccaggtagccggagggtctacgaggaatccgattgtcgcaataatcggaaatgcctccggcgggaatccgaacaggtttacaatgagcatctcaccaatcagtccgccgccggggacgccggacatgacgacgcctcccaaaatcgcaatacagacacaggtaatataggttccgattccggaaaaatcctggccgaatattccgaataaaaacgatatctttaagatcgaggacagacatgttccatccatatgcattgttgctccaatcggaagcacaatatccctgatgtctttcggaacgccgatggtttttgcagcatccagattgaccggaagcgtggcgatggagctctgggtagccagtgatgtcaccgacgcatttaaaatgtttttaaaaaacttcctggtgcccggccttccccctgcaaaataagagtatgcggcaaatgcggcaaagaaatacacaacgcagagcggatagtagataatcatcgcttttgcataggagcccaacagctgaggtccaaactcaccaatcagggccgcaaaataggctccaaggccgatgggcgcatagtacattatcaaagaaatcatcttcatcataactgccgagagcgcttccagcccttttgcaaccatactgttattatccttccccgtcaggctcacacatactccaaacaggacggaaaaacagatcagcgggagcatgtttgctttggagagcagtccggcaaaatcattcaccgtaagcgcctttacaatctgttcgcccagattgacgctgtctaaggcttccggagcggtcagcgctatattgacaccctcagccggcggaaataattttaccataacaatgataacaacagatgcaatcgcacccgtcacgatgaaaacccccagcatatagccaagaatctttcccaggcgcctcatactgagcatatttcccacagcgctcgatatggttataaacaccaggggaacaaccgcacagaacatcaggttaatgaatatgtccccgaagggctttaatattgttgccttctcgccaaatacgagaccgatgatacttccgattgctatacctgcaatcaatgtaagaggaaaacggtagttctcccaaaatgtggatttatttttctccatccccatacctcctgatctgtctgattgctgcagttcagccttcggccaaactgcagcaaatgatgctccctataacgcgcgctcccggcaaacggcggcattcagctgctccattgccttttccagtatctttctggggcaggccgtattcaggcgcatatatccgctcagctcccggtcaaaatcacagcccgcatttaatccgatgcctgcttcctctatcataaaacggtttaattcttcatctgttttaccaaggccgcggcaatccagccacataagataggtacattccggaatattggcttttatctccggaatattcttatcacagtaatcccggacatatttgacattcccttccaaataggtcagaagctggtcaagccattcttcaccttcgttataggcagccattgacgctacgagactgaagcagttattcctgtgtatctccaggctgtgccagaatttttcgaatttgtccttctcctcccggttgttaaaaataacggaggacgcctgaagtccagccaggttaaacgtcttgctgactgccgtacaggtgatggtgactgcggcaatttccggcgaaatcgaagcaatcggcgtatggcggttcccccacagcatcaggtcggcatgaatctcatcggaaagaatcggaacccggtatgtaacacagagatccccatcctttttaactcttcccgggtccaggaccgccctaccgggttctgcgggttgctcaggataaatgcctttggcccctgcttcagcttttcctcaaaatcccggaaatcaatctcataacggccgtcctccacggtcagacggtttgtcagcaccaccctgcctgcattttccacaatctcatagaattctggatataccggaggctgaaccagaatcaaatctccttcgctgctgaactgccgcaccagagccgccagtgaaggcactactccgcagttaaagctcaaaagcgatttgtccacttcccagccgttccttctcttctgccatccggcaagggcatcccaatattccccgggcctggaaacatagccaaaaataccctgatgcgccttgtcggccagagcatcctcgatcggctttgccacacggaaatccatatcggcaatccacagtggtatcacgtcttgcgttccgaactttttaattctttcgtcatacttggcagcattattgtgagttctgtcaattatctcatcaaaattataaatcacatcaaccgcctcccttctttttatagtatatcaagttcagtgtccattcacaacgtaaactttagccggttcagaaaccggaaggttactgttcggaccatgccgcttttgggcatggtccgaacagtaactttggaggttccgcttgaacccccggcccgcctatgctaaaatcaaaggtatcaattattacgtattatagaatggaaaatttcagaaatgggcagggatctgctgcccgggaaggcattcatatgtatcattatacactgcctgtcagcaataaaaacattgttgaaattgtgaagcgggccttcaatatggtggataaacggcttatcggccatggttcccgcgtttcctacatcgtatttcaaatgttaaaagcggcagacaaatattcgtcccgggaagtcagggatctcctgatccttgcggctctccatgacatcggcgcatacaagacagatgaaattgacagaatggtggagtttgaaacaaaccacgtctggaaccattccatctatggctacatgttcttcaaatattttacgccgtttgaaaaaagcgctcccgttatcctctttcaccatacaccgtgggagaagttaaaagggattgataaaatagccggacctctgaagctgtccgcccagctcattaatctggccgaccgctttgatatttatcttgaacaggcaaaggagtaccgttgttaccagacattcagccgctatatcgaaggatgctgtccggaccggtactgcccggaggcagttgcgctctttaacaaagccgatttttcttttctgttcagggagacatccggcgaatcggccgggactttactgaatgatatactggaaactgaatttgataaagtcctggaggacgtcccttttacggaggacgagaggaattccctcctgaggatgatgacttacgccattgatttccgaagtccgcatacggttacccatacaatcaccaccactgtaatcagttccgaactggcaagaatatttaccggctccgggccggaggtaaatgacatcatatgcggcgccatgctccatgatctgggtaagatcggcattccctccgaaatcctggagtttccgggaaaactgagtccccaggccatgaacgtaatgagaacccatgtcgatctgactgaaattatattgggagacagcgtgacccggaaggtaaaagatatcgcattacgtcatcatgaaaagctggacggttccggttatcccgcggcctgaagggatgcgatctgacggttccgcagcggattgtcgccatcgccgatattgtcagcgccctgacgggaaccaggagctataaagactctttccccaaagaaaaaacatgctcgattctgaatgatatggcggaaagaggattgatcgactctgtgattgtggaaagaattgttgaaaattatgacgtcattatgggagcggtgcgtgaaaaggcaacgcctatcctggagatttaccaggagatgcagaccggttatctggaactgctcaaacagcttaccgcatatatgtaggcggagtggttgaggcagccatcatcaaaaagaattggcaggccggagtgatattctccggcctgccaattttttttaagacattattatctattcttacacgtattacagtctctttaacagctcttctctcgccttctcataccccggctttccaagaagcgcaaacatgttgctcttgtagctctcgacgcccggctggttgaacggattaacgcccagcaggtagccgctgacgccgcaggcaaactcaaagaagtagaacagctggcccagggagtattcatcctgctccggaatatttaccttcaggttcggtacattgccgtccgtgtgggcaagaattgtaccgttcatcgcgctcttattgacaaagtccacattctttcctgccagatagttcataccgtccgtatcaacctcttcctcttccagaatgatttctgccggggattcctccacgttcaatacggtctcaaacataattctggaaccgtcctggataaactggcccatggaatgaaggtcggtggttaaatcaacggaagcaggcatgatacctctctgatcctttccctcactctcgccgtagagctgtttccaccactcagacacatagtggaggctcggctcatagttggccacaatctcaaccatctttccttttctgtggagaatgtttctgactgccgcatataagagcgacggattctcctcataagacgcctcaagcgctttctttcttccgcttgccgcgccctccatcaatttatcaatgtcggctccgcttacagcgattggaagcagtcctaccgccgtcagaaccgagtagcgtccgcccacgtcatccggaactacgaaggactcatatccctcctcatttgccaggttcttaagcgcgcctctcgccttatccgtcgtcgcatagattctcttgtttgcctcttctttaccgtatttctcgatcagcatcttcttgaatacgcggaatgcaatggccggctccgtcgtagtgccggatttactgataatattgatggaaaaatccttgccttccagcatatcctgaagatctttaatatatttgctgctgatgctgttgcccacaaagtagatctccggtgtttttctcctgtccttcggtaaattattgtaaaagctatgggataagaaatcgatggctgctctcgcaccgaggtaagaaccgccgatacctaccaccagaagtacatccgagtcattctgaattctctttgccgcttctttgattcttgcaaattcctctttatcgtaatctacaggcaggtcaatccagcccaggaagtcatttcctgcgcctgtcctgttcacaaggatgtccttcgcaaacagtacggtatcctttaaattgtccagctcctcctgatttacaaatccggccgcttttgaataatcgaagcttacttctcttcccattgtcttcgtctccttttcacatgccttacggatactctgatgtctccatagggctttgataaaaacttgtctatgttttctttcttattataacaatgcggcaggtatttatcaaccgggaaactggaaaaattatgaaccggtaaagtgcttcttgactttaccgtggtacaatactacaattgatgcaatcggcacgcagtccgggatgtccgctattccgaacgggccggtgatgctttgagggagcatgtgaatatgaggaggataagttatgtcgtatgtcgatgaagtttacagtaaaaccgtggaagataaccccggtgaatatgaattccaccaggctgtaaaagagattctggattctcttaagctcgttattgattcggatgaaaagaaataccgggatgcatctctgctggagcgcctgattgaaccggaacgtattatttccttccgggttccctgggttgacgacagcgggcatcttcagataaacaaaggctaccgcattcagtacaacagtgcaatcggtccctacaagggaggactccgcttccactcctcggtaaacctgaatctcttaaaatttctgggatttgaacagaccttcaagaatgctttgaccggccttcccatcggaggcgctaagggaggctctaattttgaccgcaaggggaaatccgaacgcgaaattatggccttctgccagagcttcatgtcggagctgttcaaatatatcggggacgatctggatatcccggcaggcgatatcggggccggctcccgggaaatcggctttctattcggacagtataaaaggctggccgggctccactgcggcgccctgacaggaaaaggcccctctttcggaggttccccgatccgtacccaggcaacgggatacggcctcgtctatatgctggaaaatatgctgcgccggcatggaaagggactggacggcaaagtcgtcgttatctcgggcgcaggcagcgtagccgtacataccattgaaaaaatacagcaattcgggcaaaagtcgtaactctgagcgattcgaacggttatatctacgacagggacggaatccgtctcgatgtggtaaagcagatcaaagaagtgcgccggggacgcattaaagaatacctggatgaagttccaactgccgtttatgaggaaaataaacgtatctggaatatcccatgccacattgcccttccctgcgcgacacagaatgagctgaatttgcaggatgcaagaaccctggccgcaaatggctgcatcgccgtggttgaaggcgccaacatgccctgtaaccgggaggcaaccgacttcctgcttggcagcaatctcctgtttatgccgggtaaagcggccaacggcgggggcgtagccgtctcgacactggaaatgcgccagaacagcatgcggatgagctggacctttgatgaggtggacgaacagctccacaagattatggctgagatttacgagaaaacatccgatgccgcggagcgctacggtgtaaaaggcaattttgtggccggcgccaatattgcggcatttgaaaagattgcagatgcgatgatgtcgcaggggtttgtgtaaacagttgaaaaaaccggtctgtgtatggaagacggacagagactgcctctgcccagtcccgttacagaccggttttttatacggtattaataagttctacatctgcttcaccgcagacggttttttccacttcttgatattgactatgaacaatatcagcgcgattgccaccccgcaatatccgtcattgttccgggcacgaacatcaacatgcctccggctaccagcagaagcctctccaatatattgagcctccacagcagccagccctgaaacgccattgatataatgatggttcctaccgttgcactgatacagacggttataattccaaccaggctgcctttaagcagcagcgcttcgctgtaacagaatgcaaatggtacgataaaaccggcaaatccgatcttacatgcctcgacagccgtagtcataggacttgtcttagccagtcccgcaccggcataggccgcaagggcaacgggcggtgtaatagccgacagacaggcaaagtagaatacgaataaatgggcggtcagcggctccagccctaatgatacgagggacggggccaggatcgaggcggcaataacataagccgatgtggtaggaagccccattcccaggataacacacgccatggctgtaaataccagcgacaggaacagatttcctcctgctgccttaatcatcatatcgccaaacaccacaccgattccggtaagcgacgtcatcgctaccacgattcccgcacaggcacagcccattacaatactcatcgagctgaatcccgattttataaaagatgggataatgtctttccatgtaaaacgtttctccttgtcaaaaagcataacaacgggaacgctggtggtcgcatacagcgctgcacgcagaggagaaagctgggcaaccagcaggctgtaaatcagaattccgattactatcagataaatccaaccggattttaatacatccctgggttttggtatatctttcgggtctaccaatgctatatccagaattttggactgggataccacagctactgcggtaccgataaaataaagcagcgcaggcaccaccgcgcatgtaacaattacaatataggggttgttggtaaacgcaaccattaaaaacgctcccgaccccataaccggcggcagaatctggcccccggtagaagcgacggcggcaacgcctgccgcgaatggggatttatatcctcttgatttcataaggggaatcgtaaacgctcccgtcccgaccacgtttgctatcgcagaaccgttgatggttcccatcagagcagaggccacaaccgctgacaatgcggggccggaccgcaccctgcccgtcagggagaatgcgatgtcattaaaaaatttactgcagccagacttctccagaaatgccccgaacattacaaacataaagataacggtggccgatacgctcatcgttgtcccaaatacaccatcaagatccgtagaaaggaaattcaggatcctggtccaggagtaacccctgtgggctatcgtcattggcaaatagggacccgcaagcgcatatgcgataaatactcctgcaagaatcggcataatccaccccagacagcgtcgcgcggcctccagaacaactatcagcaggatcagtcccgaaaaggttgccataatcgttacttttcccaggcgttcggaaatatgtgacacttcatcgcgggccatgaatacggctgcccaggtggctgctgcaagaatcaagtcaccgatcctgctgactatccgaaatgctttgtttccggcaaattttttaccgaaaaagtgatcatgaaacggcatgcttaaaagcagaattgtgatagcaaaggccaggtggaaccccctctgtgatacatagtttaactgaccgaaataaccggtaaacacatggaacagagtcatcaaaagcgcaataagtgatgccgcttttatgaataatgagtcctttccctcttctatggtctttgctgccgccaattcactgtccaggctggttacttcaatatcttccactttctttttcataaagctccccttttccaggtattcctttgttactgttcaaggaactgcgttttttagcaaagccgtgaatagtaacattccattctcatttggctgcatttccgttatttcagcatccctgcctctttgtaataagctgctgctcccggatgtaattcaattggaatatcattgcacaggaaatcaggattcttcatatccgtcattgccgcgtgggcgctggcaagttcatccacatgtgtggcaattgcctcggcaaattgataagccgtctcatcatccatcgacgcattgacaacaataagacattttacaccaaaggtcggaatatcttcatcctgcccgggataagttccggccgggatttttgttttataataggaagggtttgacgcaataattttatcaagctcctcatccgtataacctaaaaatacgcattcttttgtttgtgccacgctgagatgacctccaatcggaaggccgccgaacgctgttgtagcatcacgcaatccgtctcctacctcttctgccgcgtctccaagtccaaggtttaccgtggtgcccggtgtgattccaagctgttcgaaagcgacaagggccgcaatttcagttgccgatgcctccgggccgatcgcgacattttttccgtccagttcattgaccatcgtaaggccacttgatttgagagccatccagcctgacatggaagcaaaaacagcacaaagggcacgcacatcctcacaggcattgccctcaaaagaaccggttccctctatagcctgtaacgccacatcgcctgtcgcaaggcccagatcaatcgtgcctccctgaacattcatgcagttggccggcgaacctttggcagtctccacattcactttaaaccctgccacattatcattaataacagaagccaccgctgcccccaccgggtaaagagtcccggtggaatctcctgtcccgattgtcatgatgctggtcttgcctcctcctgcattgccggtaccgcccgaatcttccgaaccgttctgagcgcctccccctgagccgcaccctgcaagcgatgatgtaatcaatgccgatgccaataacattgccaaaccttttttcaacttcatagctcttctcctttactttcgtacattttcgggaaactgatgtattcttttgtagtagctttccgacatataaagagcgcccagcggattatgcgccaatacgcggtctttcgtcgccagcaccgtcacaggtgctttagcatgctttataaaaagtgtatcgtgacctacacacagtcccagaatgatagacaattcggctccgttatcatccaggtactccgcctgagcggccggattgcacattgcttcaaattgtcccggcctgactttttcatcatcgttcaaccccagtctttctttcggctgcgccccatcttacattttgccgaaaccacttcaaacccattttcggtcaaaattttggcaaatatatttgcctcccttttcagaccactgcaaaaggcgagccccagtttcttcattcccagctttctggcgaacgacatgatttcctccacccttgtatttcttccatacccctctgcttccacccgggcggcagtccgtgctatccgcagttcgtcctcactatacagactttccacttctgtgtaagccttctcgaatgacggacatcctttcggtgcatcccccagctcaccgcgctcgcagacgttctttccgcaaaatgcacagctgaacatattaatcatccctccctcgataacataactaccagtcatattgttctaacaatagggtgacatattaaccgttaacttaattgtaacattctatttgttataataaaaataccatttttgtatataatccatattatttgaatataccattactgttcacatgattatatttataaaatccctctcctgtttttactcccagcttatttccacgcaccatttttttaagcagcggatggggacggtattttgtatctcccgtctcgctctgaatcacttccattactgccaggataatatccaagccaatcatatcgcccaatttaagcggtcccatgggatggtttgctccaagctgcatagcagtgtctatatcttttgcagatgctgttccatctgcatagagcccaaccgcctcgttaatcatcggtacaagaatcctgtttaccacaaaaccggtggcttcctgtactgccacaggtgttttcccgatatccttgctgattctcaccagttcctgctgaatttcctccgtcatatcaagtcccgcgatcacctccaccagcttcatcacaggagccggattaaaaaaatgcattcctgcaactgggcgggaaagtccaattcccatttctgtaaccgacatagaggatgtattgctcgcaaacaggcattttggcttacatattttatccagttctctaaaggtcttcttcttaatatccataacctccgcagcggcctctattaccaagtcgcagtcgttgcagagattttccttcactcccgtctgaatccgcgccattacttcaccggcgctgttacgggtgactttccccttatttatcagccgccccagatttatgccaatccgcttctttccgtctgccgcaatctcttcattgatatcacacagcgcaacctcatatccatctgttaccgcgaaagcctgggcaattccggcacccatggtccccgcccctattattccgattttcattctggctcacctctcaacctctttgaaaagcggacctgtttccggagaaaacggtccgccgaaaatggtttaatcccgcttaacaattgccgcacagcccataccgccgccaatgcagagagtggccaggcctgttttggaactgcggcgccgcatctcgtacagaagggtaacgaaaattcttgcaccggaactgcccagtggatgtccgagagcaatagctcctccgtttacgttaactttctccatatcaaaatgcagctctcttgcaaccgccagggattgggcggcaaaagcttcgttcgcctcgattaaatccagctcctccacagtaatgcccgtcttatttaatactcgttttgttgcggcaaccggtccaatccccataatctgcggatccacaccggccaaatcaccgtaaatccaataagccattggagtgactgccagctcctctgcccttttttcactcatcagcacgactgcggccgcaccgtcattgatcccggaagaattggcggccgtgaccattccgtccttcttaaaggcaggcaaaagcccggaaataccttccaccgtaacgccttttctcggcccctcatcttcccggactgtggttatacctcttttcgtatgaatttcgacaggcacaatctcttctttaaacctgccaccggcatgagccttttcacacttaatctgactccatgccgcaaactcatccagttcctttcttgtcagtttccactgtccggccacattttcagcagtaacgcccatatgatagccgtaaaatgcatcatgaagcgcatcataaagcatgacatcctccagtgttcctgcccccagccggtaaccatagcggccactttttagaagatacggcgcctgagacatgttttcaaagcctcctgccactgcaatgtccttatctcccattgcaatcatctttgcggccaggttgatgctgtgtagcccgcttccgcacagaacattcaccgttgttgcagcagtttcgacaggaagtccggcatagattgccgcctgacgcgccggattcggacggtttcctgcctgaagcgcatttcccataaacacttcctccacctgctccggacggattcccgctctctttaccgcttcctttatcaccgatgccccaatgaaacagcaggcacactgctcaaagctcctcccattgttccaatcgcagttctgcaggcgcctgcaactaccactttattcatcgttccctcccagagcgtgtttacagctctattaaactactctatttacgcgaagctcatttacctgttctgccgtatatccaagcagttctccaagcacacgctccgtatctgcagaaagcaaaggcgcatgacggtaaatgcagggcattgtctcgctcatcttaatggcatcaccatttaatatctgccggccgattaccgggtgaacgcattccgggaacatccccgatcctccacaatatgcggatccttaataatctggctgaaatcaaacacaactccggccggaactccggcctccaggcatttatcaacaatctctttacaggtaagctgagccgaccactcttcaatcaataacttgagctgttccgcattctccgttcggatcacattactgataaatctcggatcactcagccactcggtgtggccggttacatccttacagaagcggttaaagaggctctgattgccgcatgccagaacatactccccatcttttgccgtgaaactgtcatatggtgcaattgccggatacgcattgccattcctctcatagagccggccggagtatcggtagcggatcatataattttctaacagaccaacaattgtatctagaagcgccacgtccaccttctgcccgtgtccgattacggagcgggcatttaaagcggcaagaacgcccaacgccccattgatgccggccaccagatcgccgattgctgtacccgcacgtgttggctttcctccctttggcccggtaacgctcatcatgcctcccattgcctgtgccaggagatcataacccggcctttgcgaatatctgccgtatccgccgaagccgcttatttccaaataaaccagctgagggttaatttcctttagcacctcataatcaagtcccagctttgccatgactccgggtcggaagttctcgattaagacgtctgctttctttaccagctctttcaggatttcttttccctttggctccttcatattcagggtgattccttctttattacggttcatatttgcgaagtaagccgattcaccgtctacatacggaccatactgtcgggaatcatcccccttatcaggctgctccaccttgataaccctggctcccatatccgcaagaatcgatgcgcagaacggagccgcaattacacggccaagatcaagaacagttaaattctcaagtgcgccatgtctattctccattgttacattcattactccttctcctccatcatattggcaaatgcctgtaaagacgtgctgacctgtccgtaatctctcatctgcatgtccacccccaggcggattaacgggatatctgctatttccatatcattctttatgtatgggtagtctgtttcctccgggtcgcagaactgagtaataaacataataattccctgcgctccgctctttttcaccatacgtattaaatgctttgaacgttcatgcttaagcggattcctgtcataaaggattgaatcacacccctgccgggagaattggattgccagcgcctttaaagcgtcctcttcattctcaggagcatcaatccggaaggaacggctctcatgtgccacatcgtcagccgcaataatgatgtgattttcatcaaacagcttcaaaagcttcgggctgtcacatatgatgcctgaggttacaaccttaattcccctataactgctctttgcaagagattcaagctccgcattaagagcctccagcttcgctgtatattcctcttttatcataaagtatgatgcttttaaaacagcgcttctgccgacagcagatacctcctccggatgggccgccgccagctctgtaaactttcttcttgcagcgcggcttctgttgcagacacgtattgaattctgcagcaactcatttgtaatttcttttccggcaattttttcaagctttgccttcacctcgccgtactgctctgcacagaactcgacagcgtactccgaaaaacggttctgcggatgggccagaaaaattgcccggtctcccatgacgacttttatattctgcgacatagggcgaagcgtgtcacacatagttggagtaatcacgccgtccgcatcatccagtgtaccgtccagcatcatttcaagccccagctgtgccagggagcagtagaacgtagcacagtattcttttgcccgtacaattggtttattgttacttccccaaagtcccatcggtaccatacctgcggcatgcaccagctcctccggaacataataaggcatacacgcgataacttttttacctttttctttgtattttttcaactgtcctttcggatttgccgcaatctgtgcaaactcctgaatcattttttcaattgccattattacgcctcctccgcctcttttctctccgccatggcctctacaagcccctggacgcgagtctcatagttcgccatggaaaagtttctcggatctgcctgatcaccgtcgaacgccgcaaccggcaccccaagttccttctgccagcgtctctgcatctccggcatgtatccgctccatgctttgcagcttctgttataatgcaccagaattccgtcaaccttgttatctgtacaaagctccttcctccactctgttccctcctccaggcagacagcgcccgccgtcttacaatatacctggcacatctcatccatattggcgtattcaaaaccaaaagcaggtgcatacaccacagcggtgacattgacaccatgttccttgagcggtttaaacatattctttaaatggggccagcatgggattccctccagcattatcctgtaattttctttaaagggaagcgtactctctttgttcttcacgttctcttcatattcctcaatcagctctttaaatgcttctcccacctcaggacggcagcgggccgtaatcatatcagccatatgattaaaaagatcaaaaccgcttagaggtgatggctcataccggcaataatcacagactttatgccacaatctggagttttcattggcaatggcacatgcctcctcaaatttcttctcatcaaaggtttttcccgtgatatcctctaattgatggatgcaatcccagaactgggctttcatatacttcacttgcgcctcactggctcccttttgattatggtaagggacatccagcataacaatcggaacttttctcagccttgctaccgtctcataccactttgtaaaacagttgcatccgttgttgcagcacaggacaaagtccggctgtggaaaatgtttgcctgcttttgtctcataaccgtttgccatcgccaggttaatccgctcgtaggcgcagagatccgcgtcatatcccagttcctcggcaatcgaacacattcgttccccatcatgctgggcggccacggctgctgccagattctccggataaactacattcagatcaaacgccgcataaatttcgcagggaaatttcgaagtagaccagccaaccagttcccctctcttctttgcttcccaggcatcctcataagtttttgccacgatatccttcaacttttgtgtcgcaggactggctttctttttcggtcttgtttctgccgtattttccgccatcataaaatctcctttctccctttatattttgcctcatgattggtttatttttttatatttttggtaggcataaactgccgctccaattgccccgcatattgggataattccgatataacaacatcacatttgatctgttcctctatcgctttgattacatcactgttccggctgacacccccggtcataaggaccggttccaatagtcccacacggtgaaccagaccggttaccttgcttgcaaccgaccgatgaatgcctgctgcaatatcattcagtgaagctcccctggaaagctgggatatcacctcactttctgcaaacacggtgcaggtggagcttatctgtgcaggatctctggattttgccccaagctgcgccagttcgtccactctgacctgcaggaccttagccatcagttcaagaaagcgccctgttccggccgcacacttatcattcatctgaaatgataccagcattccgttatctatgccgagtaccttaatgtcctgccctccgatatcaattaccgttttcacgtccttcagcagaaactgggcgcccttggcgtggcagctcagttcgctcatgtcagagtctgctattccctctgcctgccgcccatacccggttgccacagaataactgatgtcggagtgcttaattgcattgcctgcaaacagagtacataagaccttctccggtccgtcggtgccggttcccgcatcgaccagcgctttagccgccagctccttcccattttttaataccacacatttggaagtagtggagcctacatcaatccccaatgtataaaccatcttctccataagctcctcctttttatttttctgtaaaatcccttgccagtcggactgaagcgcactgttgctgtggagtctcacagtaatccgctctataatcagcctcatcatattcatcgcagtttctaaccagtgggttgatgccctgtcttcgaatcccgcttttgtacggctggctgcctgctttgggcggctcccgcttttttccgtctccggcgagacttccaaataatattttggcaattatatttcgaaatcccatttttcccccttgctgcccaatcctgtgccgattggctctactgttctattttcatgttttccatatctcgtatcatgcggggcaccagcatttgatggaacggacatgtactagaaggattttgataggctgctccgacaaatgcgcaaatataacttctcagtttatttaaatccactatctcatctacccagccctgctttgcacaataggcagggcgtgattttctgtggtagtcctgaatgattcggttcattttatcaatcgtcggctgcagatcttttccttcgtcgtaatccttcacaagacgccttgcaaacatggcggcggcagcggtttcactatgcataacatacatctccgtcgcagcggttcccaaactgatcacattccgttttgtgcacatcgggccgcccattacataatgagccgctccggttccttttcgaagcgtgatttccatctgcggcgtcgacgcattctgagccgcatacatcagacttgcccccattgcaagaagctcggccttttcagccggttcccctacgtcaataccggtcgtatcctgaaaccagattacgggaatacggtccctggcgcagagtgtcacgaattcattcattttcagcagcccctgcctgtacaattttccgccgacgccgatgccgttttctatgtattcgggatacttttgtaagatcccctggtaattagagattgcacctgccaaaagcccattgaattttaccagtccgcagatgatttccggtccgtaatccggcttgaactcataaagctcactggcatcggtcagacgggacaggatatcccgcatatcataagcccggcgctgatttatcgggagaagactgtacaaatcctccgcatcatatctcggctcagcaggttcggccacccggaaaaaattttcattgtagtgaggagtggcatcgacatatttttttaatgcattaattacgccctcttcgtttccataaacttcacggaaaaggccggtttcatcataatgagtcttaacatctcccaggacaggacctcttttaaaatttttggtggctttaatcagttccatagccccctctttatcaacatgtcctttcggattcatccctcccacaataccggctcctccaacggccatatttgccttttcatgcgccacaagaatcgtgggggtgatgcaatgataacctccgcctgccggattagttccaaatataccgacaatgactgggattccgttctgagacaattccatatggcggtaaaacggagtgcctccgccgatccttccggcgaacacgcgatcctgttcatcgagcttgattccggaacagttcaggaggtatacgacaggaatacgaagcttaagcgccatatcacaggcctgggtcaacttatacgcctggcctcctacccacacaccggccagttttttatgatcggaggcaattacaaccgaccacttgtcatgaattttggcaagtcccgttataacacaggtactgccgtccggattatcgtatgggttataaagactgttcacaggaaaccacgtttccgggtcaatcagggccataatccgttccatcggagtcagctgtccggttgcttttactgcttcatcgcttttcccggcatcggtagaagcctctatggcattatgaatttttatctccacctgctttaattcttcctcattatccgtccttttcatcggtaataccttgccgatctgcggcatattctggaaataacccggcatcgaatatccaaattccctcatcgcttcattctcctctcctcaatatccattattctttatccgttataatcgttatatcttataagtacatccaaggattcccgtttgccatggcggctgctgggccggacatcccgtgcaggatagccgcagactaaaattgcaaccggctctaattcttccggtatgttaaactccccctttagcgccggcgcattaaaccccattacccaggtacacccgattccctgctcaaatgcttcatacatcatatgaactgctgctattgaggcatcaatttgtccgctgggagctccgtcagcctcccgcttccagcagatatttttgtcgtaactaattacaaacgccagcggcgcatgatagtggcagggtgtacaatccttcaatctttggagcgacaccgcactttccagcaccagtattctctcactctgaaaattatgagcactgggggcaagctgcgctgcctctaaaatccgttcaatcttttcctgttcaatctttttttcagtgtcaaaccgcctgacggaataacgttttcgtgccatctctaaaaattccatacccgaaccgtcctttcttttcgatacttccacctgaataccggaggagtcttatctaagctcattatagtgcaggcaaatccatattaaaaataccattttattaacaaaaccatatcgaaacgctatagtttttaaccactatattcgtactggttttatataacatttcgttatactttacttgctttccaaacttgtacatgataagatgaatcaacagattaagggataaggagctgatttgctgaatgaatttcgaacattataaaaattttgttgctatcattgatgccggaactatatccgccgcctccaaggaattgatgatcgcccagccagctctgagcaatcaaataaaaagcctggaggatacctacggcgccccgttagtgatccgtaagccgcgtcacatcgagctcaccgacgccggcaaaatcttatatgaaaaaataaaatccatctgctatctggaggattccgccaagaaggaaatcagcgcctgtgtcgccggtaaccgcggtactctgtggctaggcacgtcccccgccaatccggatccccttctatatcagattcttctggattaccatgaagcctatcctgaagtttcctttgaaattttcgaacgcaattccggtattattatcgaatcgctacaagccgggatgctcgaagtcggtgtgatccgcgctcagcctcacatactgcctcctgatatacgcccggtcctgacaatccaggaaaaaatgatggcttattttcatcagaatcatgccttgctttctccgtccatggaacagatcccaatgcgctatttaaaagaacttcctatcagcatttcacaaggacttcgaagagggttcaccgctgcctgtgaacaggaggggtttaaaccttactatatgaatatatccgcctccaggtctacctcccgcctttgggctgccgatcagaggaccgtatctatcatggccgcttccgcaccttttaatgatggcgatttctgcctaagggaaatcgcagcggacggtttaattacccagcgtatgtttgctgtcgcccgtaacaggaggctttccgccgtatctgaaacatttttacagttctgccgaagccatcccctgatggagcgctggatgcagggtgcgccgattgattcatatgaacatttgggttaatcccatattatttaggaacaaaagcagaaagcggaaaaaggtattgtttccgcacaaacaatacctttttccgctcaaaattatgtaaacaatattcaattttcaattggcgccccgaaggcttcttctgtaacatctataataaagttattttccgattcattctttttcagcttccggtaaaatactgtctcatgatttcaccgataatcttcatttcgtcgccattcaggtttttcatccagtccttatcatcgcggcccttctccttgctggcggcaatctgatccaggctgtgcttcagatagtcaatatcccgccggaccgtattatctccgtcccggttcctggacggaccgtcaatttcactgtcccgggccatgctgtcccggttccttccgcgcagaggcagcgtgtccgctctcgacgcggctgtcttgtccacggcagaaccctcctcctcgtcgggccgcatatcgtcttctttcatattacggaccgtcctgagcagttcctccgctttggagtttctgtttcttatatttcttggagacagctgacgcggttcttcttcacgcaccaggccgtctttgatttcattctcacggctgagccgctctcttcctgctattcccgcaaccgcacgggcctgtcccgccgtttcccgcgtggaattctctctggcagctctgacaaatactgaattatccacatattccaataatacggtttccagcttctgctgtttctgggtgatgttaaagctgctgtccataaaagtgaggaacaggccgctgagcgcaccaatcgaagcatacaggacaatataataggaatccagcctgtaccaataagacataaaggaaccaaatcctcccgccagaaggctcaggatcgtcatctgtaaagacagattgttccaactgtccagtgaaacatgcataaaccgaaacccatacaggtgcttgtccagatacgcctgggtattgacgatattctggtttagacgatacgcattttccaatttctgctttagtacctttaaattcttgttcttggtcattgccatgttgtcagtttcttttaataatcttttgtagaggctccgtgtgattaatttgctgacgattcctataattcctattgccgccaacacggataatgcttttccggtttgtaaaaattccagcataaaaaagctcccctttcttctccagattgttccagatgacatttattatagccgcccgtccctggtttgggaagatgagaatgggaaaaatcgatcgtcaaatatagccacaattcgattatcaggttaaaaaagcagtcatatctaaacctcaggcgccgatgctcaggccctggaaatcatttccagaaggagccggacggagtgtttaattgcctgttcttcaaatacggcgtaatccatacctgcgctgtcgtccgctttatcagaaatcgctctgattaccaggtacgggatcccgttaagatatgccgcctgggcaattgcggccccttccatctccgtacagcttgcaccgaacgtctcaatcagccatttctttttatctttatcggaaataaactgatctccgctcaccacgcgtcccttaaatgcctgaatatcgggattaaccctcttattacactccatcgcaagctctaaaagcttctcgtccgcttgaaacgcaaaggtatccaccctcgggatctgccctttctgataaccaaacccgctggcatccatatcatgctggaccgcgtctgtggaaagcacaatatcaccgatattaatttcattccgcagggagccggcgataccggtattaataatcgcactgacgccgaaacggtcggccaggatctggctgcacatccccgcattcaccttgccgatgccggagcgcaccaccactgcgtccctgccgcttaactttccttcataaaaatccattccggccaccgttgtgatcgtaacatccgtcatttcttcttttacttttgccacttcctcgtccattgctccgattattccaatcatatttcattcctccatactttctctgcttcttctataatatataattatagccatttttgcacagctatctcatcttgcgcatatctagattattatagtgtatttttacattcttgacaattcctttagaataaggctataatcaatttttgtatggctcataacagttcatgttgtttggattgttacgatggccctgaagccgtccgggctgtatagtaaccttaatatacatattttcatacatgtctgtatgatttagaacgtatacaacgcatatttacaaacgaagcggctgtatggatttacagttcacaagtagtattattattaattcatttggaggtagcaacacatgaagtataagacgcagggagtctgttcccgtgaaatcagctttgaagtagaaaacaataagctcaaaaatgtaaaatttgtaggcggctgcgccggtaacacccagggcgtggcccgtctggtggagggcatggatatcgacgatgtaatcgcccgtacggagggaattaactgcggtttccgcccaacttcctgtccggatcagcttgcccgggctctgaagcagtataaagcagaacaagccggaagatagtaacgttgttactgttcacacggtaacgtcccgcgaggtgttttcgtgcgttttctgcgcgaaaatcccggggtacacggcgcgaaactgcgttttatgcagtttctgtgtatcgcgaagcgtgttattgtttacatcatgccgcttttgggcatggtgtgaacaataacgctgttacttatatcttgggatattttatagttttgtaatatattttcccatctatccatggtataatggggctatcagaagggagagataaaaatgaatgagaagacaatgtttaaattaacctatggtttgttcgtcttgacagccagacagggagagaaggacaatggatgcatcatcaataccgcaggccaggtaaccgctgttcctaaccgcatcagcatcgctgtcaataaggcaaactatacccatgacatggtattggctacaaagaaattcaatgtctccattttaagtgaagatgcaaagttctccacattccagaggtttggattccaatcaggaaaagatgtgaacaaattcgaaggatatgatcaggttaaacgggccgaaaacggtatttactatgtaacagaggggactaacggctatatttccgccaccgtggaaagcacgatggatcttggaagccacactctgtttattgccgccgtggatgatatggacgttctgagcgatgttccctccacgacatacaactactaccagagcaatatcaagccaaagcctgccgcaccggccagtaagaccggaaagacaatctggcgctgccggatctgcggatatgaatatgagggagaagagcttccggctgactttatctgcccggtctgcaagcatcccgcttccgactttgagaaggttattgtgtaagaataatacctgcctccgtattgtttccgacagtgcggaggtttttcaattctgatcactcattttcctcccgatcccgttctttcatcttaaaacataacgccatgaaatcttttgccggcttgttcaggaatttattctgatgatagataatatagaattcacgtttcaattccacgcctttaacgtaaaactgagccactttaccagcagccagatactccttggccgcctgataggagatggccgcgatacccagatttttctccacagccttcagaattgcctgatagcttacactctgccacactgtgcggaaccgtattttattcatctgcagaagttcggtgagcagcttccgttcaaaggaatcacgttccctcataataaaactgcagtcgtccatctgctccatttcgatcacggaaccggcccagggatgctccccggcgcagataaaaacgagggaattatccatgaaaagctcactctttataaaatggttaaataccgggccttcaataagcgcaaaatccagcttgctgtttagtatgagctgctcaattctagccgaattgtcaacagtcacctctatttcgatgcccggacagctattatgaaacgccttcacacattggggaagaaaattgttgccgattgtgacgttactgccgattctcagggaaccgagtgaatcccagttcttaatttcaaattccatctcatcaaacagaatgactatctgcctggaatattccagaaatcgccggccggcctccgtgatacggagacggtttgagatgcggtcaaatagtttctgtccataataatgctccagctccgcaatggcaaagctgactgccggctgtgcaatatacagttcttttgccgccgcagtcgtacttccggtatcgcaaacagctataaatatcttgatatgtctcaacgtcatatagttctccccaatcctctaaacctgattctatcacattttccttgatagttagtatacggattccatatagtctgtatacttttatattattttacatatagtccgtcaagatatacaatattttcataatttaccaccttcaaaaaggagaccggcatggatattgtaagtctggctaatgaactagaagattatattattggacagcgacgctattttcaccgctttcccgagcctgcatgggaggaagtgcagacgacgctggccattgaacgccagcttgaggaaatgggtctggaacctttgcgctttgatgacatttccggcgtctattcctatatacggggtaaaaaagcaggcaaaaacgcaaagaccatcctgctgagagccgatattgacggtgtatctgtccaggaaaaaaccggccttgcattctccagtgaaaatgccggcatgatgcatgcatgcggacgtgactgccatatagcaatgctgctcggtgcagcaaaactcttaaaaaacatggaaaattccctagccggtcatgtgaagctttttttccaggccgcagaggaaagcgccgaatcttcccaggagtatatcagaaggggctttctgcaggatgtggacgcagtctgcggagcccatgtctacggggggctcgaagctccctacatcgatatttcaccggggtacaggatggccagtgcagataaattcgatatagaagtcacgggactggccgctcacggcagccttccgcatacgggcagggatgcactggtcgcagccgcagccataatcagcagcctgcagacctatgtttccagaaacaatgatcctctgaatcctcttgtcattactatcggaacaatccgcggaggctctcagaggaatatcatagcgggcagggttaaaatggaaggcaccgtccggatgcattctgccgaaaggagaaagtttatcgaaagcggcatgcagaaaatcatagccggaacagcggaagcattcggctgtgaggcggttctgtcttatcagtacatgctgccgcctctgtataattctcccggactgagcgcgattgccggaaacgcaatccgaaagcttttcggcgatcatatccgccgggacatgcctccggtcatggcaagtgaagattttgcctgtcttacggaaaatatccccggactgtatatcaatatcggatgcgccaataagcagctcggtttcacggaaaacaactacagcagccggtttatggtggatgaaagtgtattaaaaaacggttcagcccttactgcacaaatagctgccgattatttaggaggaaacgaatggccaaaagactgaaatattttaatgaagtgcagattatgcgaaacaacatggagcttgtgaaggatacgaacggcagtgtcagcgtaacgcccgaagaagtgacggtccaagacagggggacctttgtcatcacctacaccgtctgggacgatcccatccatatcggaggcgttctgcgttttaccatcccctttgggtttacaaagccccagatatccatgccgatttttccaggatatgtgactgcaaaaaccacgagagcaaacgcctcagtaaaaacctttatcgtagagaatgactggtggaagcgtgggcctgaccgcaccaagacagagaatgtatccgagcacgtcggctcccatgtatgggtccggatactggggcatggactcacaaagggggatcaggttatcctcacctacggcgatacctcatacgccgcccaggcagccgccggatactgccggactacagggccggtccagtttgatgtggcgacggatcagaagggcacgcttgaagcgccttacagcggttattatcttacctcaaatccgccaatcgtgatggttcatccgaaaccggcctccttttttgaaatttttatcccctcggatttgaaaaccggagttgaggcggagtgtacggttattgccgtggatccctgccacaacctggccgaatcccacaccgggagactgcagtgctggcttgaaggcggtatgtccgaaaccactcttatctatgacggtcagtttgaagcggacgactgcggaataaagaagatacgtttcatacctcagacagaaggtactctgagcatccgggccggggatgaaagcggctgtctgtccggagtgagcaatccgggtatctgccgcagggaggaatgcgctgtcaggcattattggggagacctccacggccatacaggcatccagtggggacgcggcagcggtcggtcttattatgaatttgcccgggaagctgccgccatagatttctgtgccctgacggatccggatgcaggaagatacaccaacgataataaaacagcccgcctctcattgagctgttatatgacggagcgtcaatggaaagagatacaggaagtcaacaaggcattttatgaggaaggccggtttgttcccatactcggctatgagtatcataatgatgctccgaacccggagttcggaggagatcggaatgtttattatgagtcttatgatgaacctatccggcgctgtgtcgatgagggaagcttctgcccggaagaactgtgggcccagctaaaggaacaaaaagtgagagccattacggttccccaccacactgccaaagaggtcatgctgggaagctgggaaatccatgacgaggaaattcagcgtctggcggaaatctattcctgctggggcagctccgaatgcgagggatgcgaacgtccgattatcggaggttcggtctacgagaaccattcgatccagtatgcgctgaacaaggggtaccgcctcggttttgtgaccggcagcgatacgcacgcaggaaaccccggctatgcccactgggtattttcggcggagttagaaagctaccggggaggattaacctgtattatggcagaccgccttgataaacacagcctgttcgaggcgctgtggaacaggcgggtatatgcgacgaccggtgagcgcattattctggattttacggttaacggcgcctgcatgggacaggagatatccctgtcggacaaccgggtgcggacgctccatgtaaaggttaccggtaccgggagattgaatcggttgaaattatttcaatgggcatacaatttacagaaaaggggggtgcgggaaggaaatggaatttgactggcaggatgagagcctgccggaggccggatggctttattactacgttcgtgtaatccagaaggacaaggctattgcgtggtccagtccaatctgggtgagctgataagggggagcataccatggaaagtgagagaaaaaagaaaactgaggggattcagaaacaggaaggaaccgtgaaaccagaaaggacggaaggccgggaggtgatggagaggcatctcttatcctcctccaaatcattgcttgtaatggcggtatccctggcaatcctgctgtactgtgtcgctatcttaaaagtaaatcccggtgtaagcttgattctttcggcgttgtccgccgtctatctgggcatggccttcggctgtccctggaaacaattcgaaaatgacatcggggacacttttaaaaccatgtttatgggcatgctgattatgatgtttgtgggcattctgatcggctcctggatggtgtcgggaaccgttccgctgatgatgtattatggcttaaagctgctcccggctcctatcttcctggtagccagctgtctgctctgctgcctgatgtccctgatgaccggcacctcatggggaaccatgggaaccgtgggcgttgccctgatcggcgtggcggagggactgggaatccctgtagcctatgcggccggctccatcgtggtgggcgccatcttcggcgacaaactctcgccgctttcggatacgacaatcatggctccctatgtctcaggggtggatattatcgaccatatcaaatccatgctgtatacgaccgttccgtgcctggttatttccctgattctctatgcggtactgggtatgaaattccagggaggacatattgacagccaagcttacagtcagattcttagcaccctggaaggaactttcaacttaaatcccatactgctgctgcctcccgttgttgtactcgttctaatcttcatgcgcaagccgacgatcccggtctttggaatcgggatactcctggcagcggtacttgccgtcgctgtccagggaaagggaatcaaagaagttctgtctgccatgacaagcggactcggtatctccaccgatatggcgctggtcgactccatgatcaaccgcggaggcctgctgagcatgatgccgtccgtagccctgatcatcggcgcagccgtgttcagctcggccctaaaggccacgggcgtgttccagatgttcctggacgccatccagaagtacgcgaccggacgcaagtcgctgctgggattcagttacctccttcaccttatcctggcatcctttacgggcgtctatctggtaaccttctccatcgtcggtcctatcctcggcccgatgtttgacaagtatgatcttgacaggaagaatctctccagaatgctggaggacacaggaaccgcattttccccgattgtaccatggagcaatatctccatttttatcctgggcacgctgggagtcagttccttccaatacgttttatatgcgccgatcacttatctgggcgttgtatttgctgctatttacataatgacagggtttgggatattcaacaggaaaggcgagatgctgattaaggaaaagaaatgattcattaccggcccggagaacgctttcaatacgaaaggcgttttccgggccggttgttctgactagaaccgctcatatttttgaaggagattgttcaatctatcagttattagcaatttaagttttgcaggttctactttgagtaagttatcgccatagtgaataaaataatcagcaataaagttttgttcgtccctattgtaaaatcccttaataacatggcaccccatttccgaacataattgcatggaaggataatgctctttgtaaaataagtctactcctttctctgaaaccgtaacttgaaattcagtagcagagccgtctttatatagcttatccgccggacgcttaaactcttctattggcttacccttaaatagggcagtagcattgacagattggattctgtcacatctaaaaacctggattttttcggtttcaaaattataggcggttccgtaccattgtccaaacgccgaagaaatgtcaaaaaattgtaccgtatattcatggatatcttgttttttgtattcaataatgcatggactttctttaattgccatttttaatatatcttttagacatgtacttgaatttgagtgctcaacagtgtttagccggaaaacagtctccatcttatgcaaagcgtgaatttgttcttctgatagacatttctcaaattttagttttaacttttctacacttagatgaaatggcgtggactgatatgcgcttaatgtaagcatggcaaaataaagtgaatacacttcatcaatggtaaacacaatgggagataagagccggttaggcaatattttataagagccatttctaccagactttgagtatattggcatacctaattcttccaacgactttatatctctaatagcagagcttcgagatatatggtatctctccataatatccttgatgttaaaagagtttttattgttcaaaaacatcatcatatcattaagacgttcagattttttcattagttttctccatttctataaaaggtgtcacattttgacacctttatctattatactatatctaaatcataaatcaatggaggcgaacagaaatgagaacaagagatgaattttttaggataatggaacagcagacagaaatagcccttgccacaagtgcagacaatgtaccgaatgtgcgaattgtaaatttttattttgaccctcagagtaagattttatatttctcaacatttaaaggtaacaataaagtaaaggaaatgaaaataaattccagtgttgcttttaccaccattccacatacagggaatgaacatataaaagcaaagggtattgctcaaaagagtgagcggacaatttttgacctcgcagacttctttatcaaaaaagtgccagattacaaagacaccatagagcatgtgggaaaatctctagtgctatatgaaattaaatttgattctgcaacagttacgcttgatttaaacaatatcaaaaaagtcaagatataatcggccgttatataaagtagcaaagccagccgagccggtcagcgtcaaggaaaagggccctgaaaacccagagccctttcattataattacagttgtgcaatgcactcgacttctaccagaccgccaagcggcagcttggccacctggacacaggatcttgccggaaaatcacccccgaaataagactcataaatcttattaaccgctgcaaaatcgttcatatccgtcaggaaaatcgtagtcttaacaatctttgtatagtctgttcccgcctgcctgaggatggctcccaggttcttcatggagcagtgcgcctgagcctctactccgtcggccagcccgcctgcggcagtgtcaattccaagctgccccgacacgtaaaccatcccgtttgatctcactgcctgcacataaggcccaaccgcctttggcgcattttctgtaaaaatgatttctcttgccatttatctgattacctcttttccttttttccgaagtaccgctccgcttctcttaccggtgtgttttccgttctcaaccgtcagctcgccgccgataatcacatattcaattccctccgggtactgaaccggatccacgaaggttcctttatcaatgacagtatcaggattgaaaatacacagatcggcgcagtaccctgccttcacttcgcctctgcccgtcatattaaatgtcacagccggtttcttcgtcatcttgtaaacggcttcctccagtgtcagagccttctcttcccttacatactttccgagaattctcggaaatgcgccgtatacgcggggatgcggcttgccgcccagcagtccgtcggtacatgcgttcatctccggccgtttcatgatacggattacgtgttcctccgttccgtagaaatccaccatgcctaccgcattctcctcctcaaagagaaggtcgaatgtggcctcatacggatcttttccccgcagtttacccagttcaatgaggtttaacccgattgcgtcctgattcttttcggtcttcacgcttgtcacaaatatctggtcaagcccggcaaattccacaaagttgtcccatcccggaataccatgctcgatatcataaaccatcttttttctcagctccggatcagccagacgctccagcactttatctgtgcctccgtcatgcacccatggaggaaggattacacccagcatcgtgcttccggccacatatgggtactggtcgaaggaaacacggatgccctccttcttagcctcttccagaagctcgataaccttatcaaccttatcccagttctttttaccgcataccttgaaatgggagtagtgaatccttacgcccgactcacggccgattttaataacttcttccatagaatcgaggatggtatctgcctcacttctctggtggatgacaaaaagcccgtcgtactctgccaccaccttacacatctcgatgatttccctggactcggaatatgcacagggcatataaatcaggcccgttgataagcctacggctccggcctccatctcccgtcttgtgacagcacacattctctccagctcttcatcgtttggaagacggttttcgagccccatcgcctccattctgatattgccgtgcggcacgagataacattcattcagtcccggttttacgtcgtcgatcatctgaagataattctcagtggtctcataattccagtcaatcaggtcgctgtcaccgtccagtcccgccagattctttctccacgggctgacatattcttttggaagaggcgccatggagataccgtcctgtccgagaatctcggttgtgattccctgcagtacctttggggcaacctccggctctaccagaacttgaaggtcactgtggctgtgcgtatcgatgaaaccgggagctacaacaagcccttcggcattaatgatttctgctccgtcctcttcaatcgtctccgctatcttctcaatgataccgccgtttaataatacatcagctttatatcccggattaccgcttccgtcaacgataaaaccatttttaattaattttttcactgttatcacctctgtttttccacgttagccgccattattcccggaaaggtatatcctgtcccagcttttgatcatattttttcagagtaaagtttttcattaaaattacgtagattacaacactgatagcaagtcccgcaaagaaggaataatcgcctgccaggagtgacagtccaaacgaaaccaccatagtgactactgaactcatattaaagccgcgcgtatactgatactggcctcccacattatataaatcatccacgttaagcgtgcatttgcgcaccaggaaatagtccgccagcatgataccgatgattggccctaacaatgttgagaaatttgactgaattactaccaggaaatctcctccctgctgtttccacggcatcatcagaagtccgataacacccgaaatgattgtcgtcatccaaaacttgcatttaggaaaaatatttaacaggatataagccggaggcatcaggtttgccgccgtgttcgtcgaccactgggcaaaggcaatcgcaatgaagcagaagacaagcactaccatattatttgagaataaactgtatactacgttgtttaaatcccactcatgtgtatagataccggctgccataccaaccatcatagcgatgatacctacagccatcagccccacaagctgtcccaggattgcatttttattacgctttacaaggccctcatttttataattatcacttcgtttaatctgtcttgccagatccgggccgttcagggccatcgtaatccatcctcctgcaatgccggaaatggcaaatgccatggaataattacctgccgcctgcactcccatgatatcgggaatcgacactccatatttactgcacaccgtcactactatcgccgcaaacataattcccagcatcggaaccgcaatccagtcaaattttgccattgcctccattccgaacagggcgttaataatctgaaatgcagcaaacagaatcagcatcaatgttacattgttaaatgacgggaacataattcccataatcatatttaacgcattggctccaacccacgtctggaatccaaaccagtaaaagcacggaacgcagcggacaagtcctgcaaagaaggaacctttatacccaaatgccgccctgctgtatacagcgaacggaacaccgtatttagttccgatatcaccggctaaaacagtcaggaacgtaacaaggccgtagcccagaaataccacaagtaccagcatccagggtgataatccgtcgccgccgttaaaatactgggctcccaggctgaatgctacgatattgatggtcatgcctgcccaaagtattgtataatcccacagggataaattccgttcgctgtccttggtcgggagcagttccggactccttaaactgagtgacttttcattctgcataaaataacctccacctctttgtcttgtgtaataactatcagttcaacccataccgctccagataatccggattaatctttctcttgataaattctcctttgcctttttcccctttgaattcgccgtcttccacaattacatcgccctttgcaatcgtcatcaccggatagcccttaacctggaatccgtcatgcaggcaatagctgatgttattatgcaggacctcttttgacagcgtaacctctttatccatatcaactatgacgatgtccgcatcggaacctggcgctatcacgcctttctgaggatagcagccatagatctttgctatattggtacttgtaagctcacataccttgtttatggaaatacgcccttttgacacaccctcggagagcatcagcgggagtcttatttcaatgccgctcattccgtttaccactttggtgaaatcctgcttccaggttccgtccggattcttttcgaggaacagggatttttcatccacgtcaaatgtgcagtcatcggaaccggtcagcaggatagtgccgtccttcaggccctcccataattcctccgcctcctttggcgtccgcagcggcggtgaacagatagccagatgaccgttctcgcctttatacaaatcatcaaataaagtgaggtagtgaggtcctgtttccacatacaggggtagtccctttccgtgcgcccgtctggccgtatttaacgcctctccgtttgtcgtatgtacaaccagcaaagcatttcctacatattcctggaaataaacggccctggcaaatgcctccgcctcgcaaagcaccggtttgcattttgcaaaattaacccagctcagatcgttttcttccatacacttttcaatattcgtctccgcaattgcattgctctcgcagtgaaccataggaaggccgttgacggattttgctttttcaaatactttcagcatcgtctcatcatcactcattacgccttcttttttataggtcataaacattttgaatgtcggtatgccgtattcagccatcttttcgatgtcggcaatcgcctccggcgtggactccacaaatttaccgtgtacgctgtagtcaattgccgattcttccatctcctctgctcttgccagcgcttgtgtatatggggaatccccttttcccatattggcaaaatccataaacattgttactccgccgtgtgctgcgctgacgctctgctcgtaaaagctattggcgcccagacatccctggaacggagcctggcagtgcatatgagcctcgataacacccgggagaatatattttccctccgcatctataactctttttccctcggacccgctataggtgcctaacccggcaatcttttttccgctgacggcaatatcacattttactgtcgaagacggtgaaactacatacccatttttgataattaaatcatacatataaaaacctcctctaagttttcagcggcggttaaactgccgccgtccaaattattttaacagcgcttccataaccccatagtagcactctgttacttttgtcaactgttcgatttccacatactcattcatcgtgtgtgccaggttttctctggacggcccaagtccgaaggtcttgatttttgcttcacctgcgtaatggctgccgtttgtgcagaagttgtactgggtaatttcgggagtaaaccctttgtccgtcagctttgtataaacagcctgaacaaagtcgtcatccttgtcatataaccagcccgggaagaaccgctccccttctatctcattaccggtatggcatctctccctgcctaccgcataggatgcctttaccttaagctccggatcttctgccatcagtttttccagcagcccgttaatcggctccagcacgctctcctttgtctctcctaccagaagacgcctgtcatatgtggcccggcagtattccggcacaacggatgctccaggataaggggctgatttaatgtcggtcagttccaggattccgtcacctaatacgggatgatgggtgggaaccagggtacggattgccccgattacttttgccatcttatacacggcattgattcctttttccggattcgcagagtgacacggttttccaaaggtctcaattacgatttcggctcttcctctctgtcctattttcaagttaagctgggaagcttctccgattaccacgtaatccggccggacattcttactgatttcccttgccgcaacaccttcaaaacattcctcatgcaccacgcccgccacataaatctcaccggcaaaatcttttcccgtatcctttgcgtaattggatgccgcacaggtcattgccgctacggctcccttcatatcgctggttcctctgccgtagattttgccgtcatggatttctgccgcaaagggaggataaagccactcagcttcctctgttaccggaaccgtatcgatatgtccgtcaaataaaactttttttcccggtctgtttcctttgatgcagccaataatattaccgtatttatcaaccgttacctcatcaaagcccatctgtttcatgttttccgaaagaacgccgaccactccgctctcctctccggaatagcttttctgctgaatcagcttctgacacagtgaaatcacctgttcttctctctctttttccattttcccatcctccttaactgaaacctttgtcaatttctctgatacgctccgtcccaaacgatagatttataattttccttgtctgtgtctccctccgtactgaaaaacagcactttggaattttcatccagcttcaatttattcttaagctccaccagcgttttatccctcataatctcggcaatacagccaaatgccgatgccccgctttcaccggaaaccacctttgtatctcctggctccggatttccaagcactctcattccctgggctgccgcatagtcggggcaggaaatgaagttgtcggcatagtccctcaaaacattccacccgatgctgcatggttctccacaggccaggcccgccataatggtatccatatcgccggttacaaaatgaagtttaccgtcggctgcctccgccgtcttgtaaatacagtctgccttattaggctctacaatcgttattatagggcgatcctcgccatacacggaagcgaagaatccggccactgccccggccatagaaccgactccggcctggaggaaaatatgagtcggcttctcaggaagctgcatgtacgcttcatatcccatcgttccgtatccctgcatgatccaaccgggaatatcctcatatccttcccacgcagtatcctgaaccatcacccagcccttctgttccgcctggctgttggcaagcctgacggcttcatcatagttgaggtcggtgatggatgcatctgcgccctctgccctgatattcatcaggcgttcttcggcgctgcccttcggcatgtataccaccgatttctgccgaagctgttttgctgtccaggcaactcccctgccgtggttgccgtcagtcgcagtgacaaatgtaatgtcgccaagctcccgtttaatttctcctgaaactaatttctcatacggcatctctgtgatgcttttccccaggcgctttgcaagataattgccaattgcatagcttccgcccagcaccttaaatgcattcaggccaaaccggtaggactcatcttttatgtagatattgccaagtcccattgattttgctgtatgttttaactcaactagcggagtctctttatataccggaaagcttgcatgaaaactttgtacttttttagcactttcaagattcaggaaatccaggttatacttcgggcctgatttgcgctcatactgaacaactttaaattcctctctcattgtgattctctcctttgggtttattcacctttataataagcaaacagcgtgccaaatttaactccaaaatggtgctgtttcgacatgaaactttatttttgtaaacaatacacaaaagcactctcacaaaacccgtgaaatacgtaaccagttttgtgaatattttcagaaaaagaaacgcattaaaatcactgcttagattttaatgcgtttcttaatcctgtcccaggaatttttttgaaaaaccattcctgataattcatattttagttctcataatgagaataaattctcaaatcgagaattgttttttatcaaaatgagaaataattccaatacgaaccatgtccttcctgaaaattcctgcggttccccgtatacgtcaaatccgctcggcgaacagatatcccggttcatctgccgataaaggatccggtggatttcccagcaaaaaaacaggtcctccggttctccataggattgcttcggcagattcaggtacttctgcaatggtatcgtaatcccaagctgcatcgcacatctcctgtaatttatttatcttccgaaaattatttatcttccaagcaatactgataggcaattctgggactgccatcctccatataaacaataccgcaccgccggaagccgttcttcccaattaaatgctgcattgtggagttatcgtgatgtgtatcaatcctcagattggaaatctgatcccggcaaaatgccaggcagttgtcaaaaactccttttactgctccgtcaccggcaatccggtgaattgtcccatactctttatcattcagccactttccatcctcaatataagcatatatgggatccgctccgattataaatgcaaacacaccatgcaaaattccgtcttcttccgtaaagacatataactgctcctttttaatgtcctcctccagaagctctctgggcgggtggttcttgccccactgagacgggtttcccgtctcctccatatattttctggccgtttcgtagattttcattattgcatctaaatctttatcttttgccagccgtatcatctgtaccctccattttgcggtataaagttgccagtccaattcccagtttctttgccgcctgtttttttccttcggtatcattgccgtaaatgcggatcgccttcgctatctcagagcgttccagttccctgagaggtgtcaccatatccgtgactactgtgccgcttgcacccgttttcccgacaccgggctgcggctccgatatgttggccgggagggttcccatgttaagaacaccgtcctcctccatcatattaatcataaactcaaccgtattttccagttcccggatattgccataccacggatactcataaagatgttccatcgtctcttctgaaatcttctgaagatttttcccaaaaaggctggcatagcgctttgcaaaataatacaccagctccctgatatcctcacggcgctccctcaacggtgcaatcttcagcgggataacattcaaacggtagtacaaatcctccctgaatttattattgtacatcatctctttcaaatctttgttcgtcgcagcgataattcttacatcaatcggaattacctggttggaaccaatacgggttattttccgctcctgaatcacccgcagcagcttgacctgaagatacaggggcatatcccctatctcatccaaaaagataacccctttgttagccagttcaaatttacccatcctgccattcggatccgccccggtaaacgcccctttgacatagccgaaaagctccgattccagaagaggctccggtatcgcgccgcagttgattgcaataaagcggttatctctcctgtcgctggccttccagatggcagtcgccaccagttcttttcctgttccgctctcgcctgtaatcagaaccgtcgaggtactcctggcaatcttcttaatctcctcctgcatctgccgggtttgagggctggttccgattatattaaaggtgctgagcggattcaccgtattcgttatctcgtaaaagcgctcctgcatctctctggtactctcaaatatcagtacttttgagtaacgcctcggatcctggtccaaatcatagagatgtcccatgacaaaatactctttaccattcaacagaattttgtactcattctggcggctgaaattatctcccgtcggtgtaactactgccatctgcccttccggcatatcgactgaaagctgccgtttagccggttcgtttgccatagtaactacattatccccgcctaaaattaaaatccccttctccacatgattgatcacgcagtccagagcgtcaagcagaaccgcccgctttttagattccgtcagttctcccgctttcaccgcaatgaactccgcaatctgtgccagcaaatcaagatacatcttctcattcgaaaggacacgctctttctgctccggggtactccccaccaggccaataactccgataatctcccctcccagccggatgggcattgaaatctctatctcttcattgcagatatccattttaggacatttctggcaaagtctttctttgcccggattatatataatttccacattgccggtacgaagcagatgctcatagacatacccctcctgagccatatcttcattgacatgctgctcaaaaatacctgttccggctacccggaagagattctcgtctactacttctacctctacctgcgcaacctttgacatgatatcggcgtatttcattacggtttcctggatttctaggaggatactgggcatggggtgcgggtcctttctgaaggaataggttttctgtcttgtgcctgtgttatggtatatcaaagctataataaccttatattatttttaaagagacaaattgtcaataaacattttatttatgaaataatcttaatctattataaaatcaaaaagctgccgcattagtacgacagcttataatggattgacttatataattatctatatatctgaattccatttgtccttgaagcaaatgattcatagtcatctcccagataaacagcatgtagtccacgagccctataaataccttttgggagattttcaacatctactccattaattaaataatttaattcctcgtctggattatcttcatgtttagcttcgaattcaaaacgagtaacctgtgtccaatcatttaaagactcattccatacttgtaacgtcaatgcgttacatattttatcacagggtacatgggccaatgtttgtattgttaattcaacttttcctttaccaccgtcagatatatcaacgattcctgttgaaaggatactacctctaactacacttcttgaagaccgtacattttccggtaatataattgactcgtcatcgtcatctattacttcaatgccattccaataaaaaacttctgacgcataaaccggtaccgaattaattaatactattgctaaaatacttaaaatcgttcgtttccaaaatttaatcattttcaccctctccagtttcaatatatagattttctattatattaataaaatccgctttatccataacacatgatatgtaataatatgaattatctaaaataatttccgcactatattctattttttggtcttctatagttgccgtttgtatttctatattctgattaagccatctattatatacctcttccttattctgattatttctatccgaagtaatacctgatgaattaccaacacttctaatttgctgtattacattaaagttactattaccatacttaaataacattgttgcagtatcacctgagattacagtgtctttatataccagctctggaggaatttgatctaaccgtattgcatcaattcctaatgttttctttatttcttcataagctacttctagctctccatagtcttctttgttcctatcattatccaaaactacggcattcctgatacttggtttaaccgtcttcctataagtaaaatacttcttagccccaaccgtaagtgtcgttgccatcattacgcccacaacaacagccgctaccagagcaaccttaagcattggtttgagccggcgtctctttccactcctgctctccgtttccctgtcgcggatatattggggctcaatgcctttctcttcaattttgtccaacagccgttcaaaaccatcttccggttccggaggaatctgactgtcgtcaatctcagtctgtgcacgctgaaatcgttcaaggagtgatttatcatccatcctaaaagactctttcagaagctgatccaaatcatattctgttttatgcctgtcccgatccttgtccactgtttccctcctgtatattcatacattttttaatcatggaattttattctgtttttattgttatcatcttcccggtattttagaggctgaatggcaaccttttccgtaacagttcaaccgagatgtattccgcgaggtgttttcgctgtttcttgccttttctgtgcatcatttgttgcagtttggccgaaggctgaactgtcatccttttccctacattcctccgctttgggcttgactttttgtcatttaagttactatactaatataaatgttagtttaggataccattatactgagatgcatgaactgactggtaacaattcagataacatgaactgttatgccgatcgagtctaagggtcgtaacagttcagcctgatgtattccgcaaggtgttttcgctgtctttttccgtttctgtgcatcatttgttgcagtttggccgaaggctgaactgtaactaagggtttaattgcactggatttgcagtataccttttcatgtgcatatagtataatattctagtcgttctgcggctgccgccgcaggcagcattccgctgtccgggaattgcaattgccggacagttaagttatggaggaaacctttatgaaaaaaatcattctgaccggaggcggtaccgccggccacgtcacccctaatcttgcgcttctcccttctcttcaaaaagaagaatttgaaatccgctatatcggttcctataatggaatcgagcgccgcctgatcgaggagacaggtattccctacgacggtatctcgtccggaaagctccgccgctattttgatattaaaaacttctccgatcctctgagagtcctgaaaggctatgcagaggctctgaaaattatgaaaaaatacaaaccggatgtcgtattttctaagggcggttttgtcgccgtccctgtcgtattagccgccaggcaccacaagattcctgttattatacatgaatctgatatgacgcccggcctggctaataagatttgtatccctatcgctaaaaaaatttgctgtaatttccctgaaaccttgaagtatcttcctgaagacaaggccgttctgaccggctcccctatccgggaagagctgttgaatggcgatcgtctggctggattgcaatatacccatctttctgccggccttcccgtcattcttgtaatcggtggcagccttggctcggtaactgtcaatcaggccgttcgcagtattcttcctgaactgttaaagaatttccagattatacatatctgtggcaaaggtaatctggacgaaagcctgattggtatggaaggctatgttcagtatgaatatgtggataaacctctccggcatctgttcgctgccgccgatctggtcctgtccagagcgggagccaattccatatgtgagattctggctctcagaaaacccaatattctgattcctctttctgccgccgccagccgtggagaccagatcctgaacgccaactctttcgcaaaacagggattcagcactgttctcgaagaagaggcccttacaggtgaatctctcctgcaggcaatcaatgaaacccataaaaaccgccgggcattcattgataaaatggcagaaagccacttgaacaacgcagtatctaccatcattgagctgattaatgagtgctgtaatgattaacggtaatcatcaagtaatccggcttcaataattcttttgcggagttcttttctggctcttgataaccgggaacgacagactgttcccggtattttcagtatctcacacgtctcctctgtcgataattcctgtattatcctcagaattataacatcacgccagtccttcttcataccattgacaagtttccatatctcacgatatagttcattatccataatgcaggttaatgtgtccgtccccagcagcttcgtcatgagcaggaattcttcatcctgatcatcaatactcgctacgcagcgagaattcttcctgatgctgtctctccatctgctatacaatatcttaattagtatggttgtcttcagttttgcatcccaatccatcggatagcgttcataatatcccatgatcgtatcatgcactatatcttcaatgtcatcatagtgtacgcctattgtcgcgcggcgcgcaaaacgtaactgagcttcgcgcaaaacgtaactgaaccgttacagagccctgttttttatgcaaagttttatacatttttttgcatttggcacgaaaaaagatttactttttaaaagatttaaaccgccctcaaacgaatttgaaaggcggtttaaatcgtgtttaatccatatttaacggctattttgctgcttgctttgacaggtaaatagctgcttttttattattcagcacaaaagcatcatagtaaattctgccctctacaagccagccgttaattccctgtggattctcgtggatcttgtaatccgcaagctttaccggggaagtcatagccattggatggcagattataaagtttgtaccttttacaaagtaatctgccggggctacaatgatcgtagtcttatcaatagttcccacagccccagtaacggcaatttcctggcctttatccccggaggatacgaaattcttgtctaacttgattgctttgtagtaggcggacgttacaaaagcgatacggccttcagtgggcactttagcatcaaacagcaccatggagccttccagaaatgcactgtatgctgtttctgtggtaagtgtctcctctttggtatgtgctgctaacgcttcggccgtgtatttcgcgatcctgtagcggtcgatcgtaggagttaccaccccttttaattcccgcgccagtgctttggctgcgctcattgccatcatggtgtctgttgcgtttttacggtcaatgctgaaagtgaaagacttgtcctgtgtcagttccagtgtctgcacatcattcccaagctccaccggggttccgtatcggttgctttttgcattgatatcataatcatttaaaggcactgtttcaacagaatagacattgaccttgtttactccatcaaaatcataatctttgttgaccgctttatctgtaagagaatccttacttaactgttcgtcgattgtctgagaaaatttctctgcgtagtttactgccatcgttttacctccctgttagtttttcattgctttgacaaatgcagtttcaaaatctttttccggttttccccagaacccggtagaagctgattttccaagcccttccggggtctttccacgaagtctttccgtaattccatcggataccagttccttaatggtggaaatgaccgtttccaggcttttaagtgtaccggcttcatctgtatactggatcagctccgcagcctttacggggatgccttcctccgtcaggcggttattgatctggtctttcatatttgccttgaaaagttcctttttcaactggctgatctgttcatccttcgagagattggcgaggcgttcctcttcccattcttttctcttttcgtccagaatgtcgtttaactcatcccgggaataagttttctcctcgctggaagctccttcaccctgatcggttccatcatccaaaccctgtattttttcagctttttcttttacctcatctgtcttggtttcctctgtgcgttgcggatccgcgttgctcgtaggttcctctgttactgtctgggctgcttccatgcccatggctcccatgatctgatcaataaatcccatgctcatcatcctttctttgtatactgcttcatttggcggatactggactgtaattctgaacggatctgctttaactgacggtactttctccgatctgtgtccgcttctccggtttgttccatgcttctgatctgtccccggatcctggctaattcgttttcgtactgctgaatcattaaaaacaggctcatggctctaaaactcgcttgcaatgatcttgcggcaccaggcttctgtaacaccatactttttcgccagtgtcttgtggttgcttccgtcaaactcctggcggatcttcttatccctgagatagcggcatactttttcctgtttggggatatacagctgtactccagaaaattcctgtatcagctttttgaaaccttccagcccgatggctcggatcagtgcctggcagtcttcacccaaaagggctgcatccgcttcactaagttcatttaataattcctccggtgtttttcccattgtgtagttcctccacatccttgttttactgctgctttttgatgatttcccggatacgcctggggcttacgccgtaccttgccgcaagttctgccgttgacgttttcccggctttgtaatctctgatgatccggctgtcacgttccgcaagctccaatgatgccagttttgcaacataaacacggcttccgccatagtaggcggccagcttgctgtatgcttcaaacccaatgcattccgctatttccttctgatccggtgttaaaaggcggatctgtgattccctaatagaagcgcccatctatccatccctccattctggataatataacaatggggaaccgctttgacagacaaaacagttccccttacttttcgcgccgctttatgacctgcattcatttaagaggtggtaagcggtgcggaatccacaaataaacccttcacgttcaacttcgccgcggatctctccctgcagttcccagtaggcttttaatttttccagcagctcctcatctacgcctgtttccaggatcttctctaaaagccgctccttttcaaagagcttcgcgttctcttttccaaattcacccagctttacatggtctccgatgatgcagtaaaggtttgcaatatacttgttgctttctgtgtggcagtccatgttgtcgaacattttccagtaatcccgttctttatattccatcaaatgcttatactcgtcatccggagtatagacccggcaggatgggccgtaagtgtcttcgatattctttcttacggaagaatagaagcagttcttcacttccagcagcgtctcctccatccgctcatagctggagcagtccacgccagagatcagactctggggaagcccgcattctgccagatgtccaagcgcggcatctttcagcacctggttaatcatggggatcttagcagtttctgtatttttcttcatgttcatatcctcctttggctttatatcccttttaaaaccgttcatatcccttttaaaaccgtttaaagcattcgtgataaggaagtctttatatatcgctgaaaatggattcctgcgcccatctgcgtctcatggtttgggaacggctgcaaaaaatgattgcaacaccgggaacggtctgctatactatctgtgaacacttgtgttccggcttatgccggatggaatagtcagtcttgcagggctggctatttcttttttgcccttcatcagtacatcctcccaaagagctgcttctgtgtatctttcagcatctttaatgtgacggcttccttactgatacgggcatattccaaggcaatctcataaagcttgatcgctgtacgcagactttcaagatttgccatctggatcagaaaggcaaggcagctttccggcactcctggaaaaatatgctgcatctcctcaacggtatagttgttttctacacgcttcctgacaatgatccgcgtccggatctggtcaaattcccggcctttctggcctgtaagcatttgcttatagatcttatcattgccagaaagaatgatccccacatgtgcctggtcgtttaagtcccggattgcctgtaaagcctgtaaagacaagcggtcggcctcatcaatgatgatcagacggttgcttccggaaagctgagagataagttcctgcattaccgcgctgcgccttccgtctgttgcctgtccgatcttatccgcgatcagctttaatacagacgttgcggatgtggtgcaggtatttactgttaccatggtcacgcctgcgttgctgtccctgtagtgttccagcgcggtggttttcccggctccggcatcccctgcaacaagggcaatatcgttatatttatgggcataccagcaggcatataaaacttcttttgtgttgtaaagatcaggatagtacgttgttcctgaaacgctgtttaaacggtctttactgatgcttaaaaacttgtttaaaatgtcctgtaccttcccgttatccccggtgtatttcccatccaggaactgggagatgacagaagtagaaagcccggtctctttgctgacctgtttctgtgacttccctgtctgcttcataaactgggaaaattcttcccgaaattctttcttttccatgtgttcctccttactggttgcttgcttccataagttttcctaaaaggttctcctcgcggctcgtgcgtctctgctttgttgattcctccaggatcttgctgttttctgaaagaacagggttaatgttctcaatggtctttgtgtgttcgccttctgtgaactgcttttctacaagctggttgcgggcaacgattgccataacgtccagatccctggtcggtgcatactgttcaaccagctttctggcgttctttttctctttcattgcttcccggatctgttcctgggtagtgtgacggaacggggttcttacctttgcggctgccttgcagattgcacgcatgttttcatcaaaaatatttaattcatccatgttggatgggtcataattgatgataactttctctccctggtgggcgataagatccgtatggtagtaaaaccttccctggtactgtacaccgtttttctgtacggttctttcgtcaaaggttccgcagaggatccgcaggattgacttgtcatggacttcattctttacggccaggttttcaaaatatacctgatccggacattttccgtccatgtcgattccgccagatggtgtattattgtacttgttcatgtgtttcccaagcagatctgtgaactgctccatggtagggcatttatctttcagtttctcaaaggttacccgcatatcctccggccgtttcttcgcgtcttttcccagataggtggggaagaacttacagaaacgatcttccagggtttcccagaaccgctctatcggctttgcctgtccatggtatggtgtcgcgtaaatctgattgattcccaactgtttggtaagggaaagagggaaatctttattgaatgatttctcgcggtaatcttttccgttatcgaaataaagttctttaggaactccaaattcttccattcctttccggaggcactgctttatcacggttgcgtctgcggatttatcccggataatgaaagcaataaccttgttggaacgtgcatcaaagaaagcagtgagccatgggcggaacacccggccgcgattgtttaaaactgctacatccattaaatggtggtcagaaaaccagatgtcattggagtggatgtcttccttgcttcgttccatacatacaagggaatcattgaacgctttttcgccttccctgtaaaagatgatcacgggttccggaattgttttgactttccgttcaaaggcagatacggaaggaatctccggatattccgtttttgtatattcccagcaaatttcgatactgcgtttttgtaaggtcatatacaggctatagaaaaattcccatgcatcctgtggaatatccgtctttcccctgttatgtccgccgcgcatgtcaatcaatacagcaatatccccgtttttatacttgcgttgccagcggaagagttgggactttgtaatcatgctgtctggattccgttcattaaaatctttaatgtaatcatcaggggactgttgcgacttctggtagttttctacaattaacgccttaaagttggcttcctctcgctgtttccccgtgaactgcatcatgtcattatgagcttgttccttttgtacgttgttgtatttgtcttgcgcttcctgtggcaatgactccagggcgatctcaatttgagtaccgcccctcccttttcctttaacatggcggtactcgtatttattcaattgtgtagctgattttctaacaccgcgttctgtcattcccatcagaatagctacatctttaattttcagccatgtcaaagttctcaccgcctaactttcattaagtaaggctttgataagttcttcaatgctgattccggtcactctcgaaatgttgtaaactgctcttacagatgggttgtgtctaccgttaagaatctcactcacatagaacggtgagagaccagattcttgagcaaggtctttttgatgtttacccatttttgtaaggcggttacagataagcattccgaagcgtgtctttgtttccatgtttgttggtctcggcatttctccacctccttagccgttgaatattcttgatttttttgttatatttattatggttatttgtattataatattggtttccaatattgtcaatatgattatattggatttatgtatttggaggtataaagatgtcccttaatagcagatttaaagaggtacggaaaatattaaaacaaacgcaaaagcaatatgcagaagaacttggcatctctcaagcacacttatcaaatatagagaatgagagggataatccgtcactttcattagtaaaactggtatgtgtaaaatttggagtaagtgaagaatggcttacagaagaaaaaggtgagattttttcaaaatataatggatttgatattgtaactgatgaaggtttacgatctaaatatcagatcatgaaagacatacttgaaaaacagatcgcagaacagaccggggataacttaaaaaatatcgttcaagcctattcgcattttgtcagccttgccactatgcctggattgactgacgaaaatcaagagaattatttagaagcactttgcagtataaatagtgctctagaacagattgcttataactcctatatgctgaagactgtatctgatagtaattacaaagcacttttacagcacaaaaccaagatcgataccggaatcagcagaatagatgaaaatataaaaaaggcattatcttgctacctcgtacaatacggaaaagatctgaccttgtaacgtttatttaaaaggttgtcattagatttcctagcattgcataattatgcacttttgtgtatatttatacaatattaagtgcctttattttcccttagtccatttcctataaaatcatactaaaaaagtccgttaaacattgatttaaacgtgtttttcgggctttttaaacattttctattcagttccttagtcagtgcaaaaatgtcattcagttacgttttggttccttagttagtaattatgccattttaaatacttttaaggcgaaaaccgcctaaaataagggtattttcggatttttaaagccttttaagggtctttaaggattctcaaatccccaaaagactaaggaactagttacattttgctcacaggattacacctatactggcggcaaaccttttgagcggaacggagtagtcttcgtataattcctttaaaagcctgcgttcttcctgccgcatacatttctcctatgattgtaatacttcttttatgctgctgctgatttctgcgaattcagccgaatcagccttccccggctcccacgtaaccatggctggtccgccctcgtatcttggaatgatatgtacatgaaaatgaaaaactgtctgtcctgctgtctccccgttattctgtaccacattaaatccagcgcatcccagagcctgtttcatcgccgcaccgattttgcctgccagcggaagcacctttgctgcgacctgttcatccagatcacagagatctttaaagtgttcctttggcagtatcagagcgtgtcccctggatgccggacccaaatccagaattacccgaaattctgaatcctcatataccgtggccgatggtatttcccctcctgcaattttgcaaaaaatgcaattactatctgtcattttcaccactccttattttctgcattatatatgcatcttttatttttaccgggttttctataaaaaatcatccccagaaaaataccaattagcaggccgcccacatgcgcagcattatcgactcctgtgctcgtaaacccgtgatacagagttacggccacaagtatcattagctgttgtgtactcagatcttccagccggccacggtttactgccaccgcatacacgagtccgcctacaacaccaaatattgcgcctgaagctccggccgaaacaacatagtaccctctccccatgtttacagccaaagatataatatttgcacctataccgcatagcaggtaaaaaatcagatattttacctttccaagtgcccgttccagattatctcccagaacaaataatactagcatattattgatcagatgtccaattccaaaatgcatgaaaacagaagtgagcagtctgtaatactcaccgtactgcaatataagaggcgcatacatggcgccccgtttaaccataaatcctgtatttaatgaggatcctgtaatttccagaaaaagaaaatagattatattaacagctataatagcaccgtttacatatgcctttttaccatgatttcccatatcgcacatccttcaatggcactattatagcacagcaattaacgatattctatggaattttgcaaaaacactacattgatgtaaatcgacatttttctacatcttttttatgtttttggttacatattttacccctcatacgtttctataaaatagtattttaaatccgcaaccgtgatcacatccctattttggatactaaccgtctcattagcctgcagcttataaccacctacactggtaccgttcgttgagtttaaatcagtaataatatataccccctctctcttatcgacccgcagatgaagacggctgaccgtagaatgccggatgcagaaatctgccagttccggatgcttaccgataacaaacggaacataagtaatctcaatattttcttcttcccggttaatgctttcaaataacgggaatcggttcttatcttcatcctgcgtcagcagggctgttccattctcctgcgcatgcagttcttcctgccgatcctcctctgccttcctctgccggtattccgtcacactttcgggctgaaaacgccatgattcctcttttataacaggattcaatacattttccgttttgccatacttaaattcaggtgcagcagtaatatccaccgggccggcagcgggttcctttttatattttttaccgccgctcatccggagttgcagcaatcttaccgccgctgccgctccggccgccaccgccgccggaagaccataccttgatataccctccctgccggtaaaataccatattcccccttccattgccaggaacataagaaaacactgaagtgttttggtgattttagcggttgctgcagcagcttttatcctgccggtatatttttcttctgtgaaatgttcttttgaatcctctttcccgacgtgttcatatattggccgtacgctgccaataccatcaattgccttgttttcttctggtatgtatgtcctgaactcatcttccgttttatgctgttccctgctgtcatccctgcgtttgaaaattacatcttccgtttctctcaaatgcctcaagagatctgacatcccataattctcgcgcagactctcgtgatacaggttataggccatgacaacgccttccctgtccttgtggttgattttttccagaagaaaccgaagcagttctgatagggctgccgggaaatcgcaggaatagccgggcaaaagacagagcgaaacggtaaacctgtccggatctatatatataaattccggttcgaggagtatctgctcctctttcagcagatactcctcgatttttgaaagaacctgggagaggctcagcagaatggagcggatttctcctccatttatctttctctgctccagaagccggttcagcggctgtctggatgtaatttcataatagaattcccgtttatcctcatactgcctcacacggaatctgagcagcccctctattgtattagatgcaagcatcctgcattcatatccccctccctcagaaggggcatccaatatcatataattgtggttaacctctcttttataacgaacttccacttgtctctcccccgtttaaattccggcagccctaagcagccggagaaaattttccggatcaaacttttttaccgatatatctgtttctgttttcattttcgcagttcctgagattctgtttcccttttccttcaatgaaatatttcctcctccgcaccagaaatatccccggtaatcctgctgtgcattgctctccatttcagacagtgtctgtccctcctccagacgggtgccacattccagcgcctcctgcaaaaccatatttcctgccacacgcgcatgtatgtcgaatacccctgtgatcagggacgctataaacaaaaacagcgcggacatcacaagcgcggcctctaccgtaaagctggcatccagtcttcctccgtctcttttctttccaatctccctatactctgacacgctttttgccatcggtgatacctcccaaatttactatattccaatcattttcctgtacttacgaacaacagccagaaccaggccggtataatgaatggtaaaaacggcaggcgcatttttcctgcattaataccatgaataaatccccatgctgccatccccagactgcacgtcccgcagaaaaaaaggccgcatagaaaaagcacgatagttccgtaagagccaagataacaggctgacacaataaaaaaacagccgtcgcccgcacctgccgcccctccggtacagattgtcacaagaagcagaaatatcccaggcaaaaaggcagctaacaccccggaatattcctgccatgctccggtcaacagccccagcgctccggttattccaaacaagacaagcagccatatcggtatttttgccgtcctgagatcgtaccaggctgataagagtaagaaaatactatataccagttccattctttatccccctttatttgtaacagccatacatttcacagatcgggagtgtgctccgcagactttatcttcgcccgcagccccacaccatgacaatcttcccccggaacgaaagactcatatacacaaccacccacccgtccgctggcctgcggcggggtatgaaaagtaccacaataagagcatgctcccagatgctccacctcagacaacggtactttcttcacataatatgcgatggaggtacagtccggtctgctgtgaaaatatttaccatttggcataatgtacacggtcgttccgctcactgccgcgcttccacagatactgcagggcttgtaatggctttggctgctgctgagtttatcttttaccgtgtcataatctaatgacgaaatatcgttagatatgtagtggcaatccggtgacaaatgatatctggttcctgtccttccgataaaaaccattctttctgatttgtctgcctccgctccccctgtgaattgcgtcccccctcgctcccgatccatcctcgtttaaagcttacggaggccgccggcacactgtccaggacaaacacccgaaacggcagcataagtctgtatttcgcccggagattaatctcctccccgtttttcgtaatttccgtacctgaaagatccagtccgctgattctccccggcccggccgcttccctgattttcacctccagaaatgcccgtaccgcgccttcggcaaaaagctctgccgtcacaagcgaatccgttccatccgtatcacggagttcttctccttctgtccgtctgtaaaatatgtacgcatactggctcagctctctggccgtcgtttccagcactgtttgtattttcctctgtgtatccagcatttccatcggcattgccagaattataacggcaaatataaataccgtcaggctcaatgatgcttcaagagtcaggctggcctctaataatccccttcttgtttcgcccctgcccagcccaatttcccccttcccaataataaaatttatttgtatattcttcctcccggctattgctgcagaataagaagtaaaaactccgcccgggacaggatacaacacccttattcagaatcaggctgagtctatcttaaatttataagaaaaattttgcttgaaaatctatatttttgcatttgaaatagatataattggagacttgcgatgtacttggagaggcacatttttaacttcctgttttctgaataagggcattgtattctgccccggacgcagccggctactgcctgttcctgcttaatatgctttaactgcttttttggaaattggtatcactgttccccggcctttgtattccgcctccagcctgtatgcacattttctcataagaaacgatggctggccggttcttatgtttttctgaatcatatccatcattcggtactcctttttcggaagaccggaaagccaaaacagcagtttcagataggactggtaatccagcccttccccttcattcccagatgcttcaagctccctaaacagcgctgttcctgattctgccaaacccgtcagggataccctccactctcttccctgcttcagaaacggtacctttcctccttccaaaagtgctttcacatcttcaaccgactccgccagggcccataccgtcaggataaaaaaagtagtcaccgacaccaggggcgcaatgcccgaagctcctgttattgcagccgccaaaagttccgcctcccggcgtttttccggatccttaagcagtgacatcaggttcatggcctccctgattgctacgatttgattcactgtatttttcaggttctccctgtctgaagcggaaccggacaggagatactcctgttcatatttgacgtgacgttcttcttccgacaggaagttcgtataaaaaccggcggcgtattcatgaagtaatgcggtttccggcagaaaattgcccgaccctccattatatccggtaaatcccggcatttccgtatcagacatttctgtaacagagggaaactgctgcttatcaattctgtccggcgaaacttttttcccttccggcacgactatggacagcagatcgcttccggccaggcggcttaatgattcaagaacctttcgcttttttttgtccttttttccagtcccggcaaaccgcgagtcgtacgtaaactttcctgtaactgacagcaccctcctccacaggcgcttttcgtccagctcgtcatcctcgtcgtccggttcccatgaatcaatatactcctgtacttccactgcctgccggatcgcatcctcaacgaccgccttattccgttctgccgttacttctgtctgctttacctccctatgccggctgccttctttatctgtataggagcggtagctctccatctcctccgagagcagctcccagtttgggggcttcaaatccccctgtttctttgccgcaccggattccgccacccggatctccctgctcagttcctccgctttctcttcatattcccggaccagcagaggaatccgctccagttccttcttcaatttttctgctgtttttataaatcctgtgccgttgccgttactcagctgccggttcccggcctccatgtaatttttctgccgttccaggctttcaccaatattctcgatgctttcttccagcttcagaagctgtcttccgcattcctggtattgttccgcaatggcgccaaagctttccgcttcctttaccccgtccatcgtttcctttaatataccggcatcatattccacattccaaatcccttttttcatatagtccaggatttctttctcaaaccaccggccgccgccgtctgtaatcaaggcaggagatgaaacagtcagattcctgtctgtgaccagataaaacggggcatctctgaaataactgtccagataaggctccatctccgcagccagtccgccgctctcatcaaattccagcgcaaatattctatactgttcccatacatcccggtgatacttactcatcagggaatccagcgaggaatcgagagccatctgcatataccacccgcttccggctgttctgacggattcaaagaggcctcccatgagggcgcagatgcaggttagaatcaggcttaaaaaaactgtaatacttgcatccgcttcactcatcagatttttccgcatcaccttcctcctaatagacttccttcgatttactgttaatttgcttgaaaatgttatttaacagcgtattaatctgtgacttgaaaatcaacactaatccaattaccacgacgagtataagcacgatttcgataactgtaaccccctcctcatcgttccaaaatgcgataatttccttttttaaccacatacacagtctcctttcctcaattcagattccaaaggccaaaaaggccggaaccgttatcattaccataacaatcagcagcatcatgaataaaggcagcaagagctttgtcgaggcttcctcaccgagacgtctggccaggttcttgcgctgttcaaaggcggcttccatctcagcctccagtaccggagtcaggctttttgaaccattctttacgttctgctccaatattccagccagttttctgtaaggaagaaccctgcacctgttaccaaactcggagtatgcctgaatctccggcactcccctctgcatcagataataggctgccaccatctcttcataagccgcacgtttcccggctttttcctctgtccggcggtaatcctccacgatctttgcccacgctttcctgaccggcagtccggcgcccagaaagactaccagtcttgacaatatttctgaatagtccatcatcatctgacattcccgctttttctttgcctcctgttccctctgcctgtctttaagcggcagaagaattgccgccaggatccccaacagagggaacatcaggctgctgcgcccccggtctgcgctgtaagtaagtgttttcccttcaaattcttccggtaagatgaacacctccgaatacttctgttcctcctccttttccatgagaaagttctcaaaagccgcaagttctttttcctcctgcgtcctgcccggcgggagaacgtttacccggtatatataatcctctgcatattctcctgcttttaatgtggcagtcagaaatgtctctctgccgctctccggacatccgctgttaaatacttctcccgaagcgctgatcagctccgtgtcatcaggctgccaccggaccgatatcccgtacttgtcaagccaggtgacaagctccagcctgctctgcacctgttccagcgattcattaccgcctgcaatttgagcggataattcttctgccgccatatgaattgcatctgccgcctcctcctttgtataccggcgttcgccaatcctgacagctaaaggcacttttttggcaagcagcccttccacgagaatctcctgctgagtttcgccctgaccatatgtattcctttcgagcccattcccttttgtcaggactgtgtcctgtttttccacaaaggtaacggccagcgccagaattatccccaaactcacacagataacctgtcttttgtccagtttcaagaaaccacctcatcccatattctctcctttttgcatttactcttttcactataaattttttctgtttcatctttctgtgttttcatcctctttttacaattcaatatccagtattttaaacgaaaggaaacacgatgcacaataaatcaaaagacaccctgtcataaccactcttccggcagccgtgccgtacatctgccggaaaaaaccgggagatgaaaattcaatataaatgacaatacagtatggcaccagattcataatcttctgttcaaactgcttttcagccgtcatcgtcaaaatttcctccctgacctgaagtctgtcactaatcacatgaaccgtatgattgactaccgataccagttcacctctgctccgctttgaaacagcaaagatatcggaaaaatttttgatttcctccagcccgcttctgtccgcaaactctgccagcagcgtctccaccgtcctgttcatcctcagctgatgggctatataggaaaattcctttgttatcattccctcccggccgtaaagctcctccagctcgcgaagactgcctgcaaaagcattctcaaccgaataccccgccccaagcgatgaagacaaaatcagcaccgcttccttaaactgacgcctcagttcctcctgcctctgcaatgcaagttcttttttctttgccagaggatacaggaaactcaccggaaggaacagcagaaatgccgtaaagctccggtagaacacgtatgccgtggctgcacagaacatggctccctccgccagatacaaaagccactcccttcctgaaaggcggtatctgccgtaatcctcctgtccggcccgtataccggtccgttcagcgctcaaaccctcctgcccgcagcttttccctgtttcgaagttccccgaccttttccaaagatccttcgacccattgtctgtctcttgcctgcttctcacggaaggtaaaaagcggctccagcctgacctctccgttctcacatccaatcacctccgctatctcaagtacctttctgctcttatcccgcattctgcccaaatgcaccattaattccagcgccgatgcaatctggtttctaacggctgccagcggcaggtccgccgccatcagcaccatcgtctcaaggcgtgttaccatatccctcggactgttgccgtgcccggtggaaacggaaccgtcatggcctgtattcatggcctggagcatctccagggcctccgcccctcttacctcccccaccagaatccggtccggtctcattctgagactcgccctgattaaatcccgcatggatatctccctgctgccgtcccggttttcgactctcgtctccaaccgcaccagattaggtacatgacggatctggagctcggccgaatcctcaatcgtgatgaccctctcatcctccggaataaattcagacaaagcatttaaaaatgtcgtttttcccgaacccgtgccgccgctgacaaaaatgttatacccggccctgacggccgttctcagaaaaaccgcagcctccctgctgatacttcccagccgtatcagcttgtccatcgtaacaggctccggaaattttctgattgtcagaacaggcccgtcgacagctacgggggccagaaccacatgtactctggaaccgtcctccagcctggcgtccgcaatcggggatgacagattgacggtcctgtttacctggctcacaatctgttgaatcaaatcttcaagctgctctgccgaatcaaaagctttgtcccatcggcttaaccgtcccttcttttcaataaatatatgatcttttccatttaccatgatttcagttatatcaggatcgtccaccagctcctgcaggatgtccagacgcctgaaggagtcaaacaattcttttttcagccggagcctggacttgagcggcaggtaggaccgctccgcctcaccggccaccgcagcgtcaatcatctcctgaagctcttcatcctcgagctgcatccgcccttccagctctctcagaagccctgctttcagcctgtcttttctctccttttcttccgccagggccggtatcccgtttatggccttctacctcccctcagaagctgtctcacataatcccccagctctccccacaagagctgctcaagataattctcccttctcccaaagctgctgtgatatggcagcttcagcttcttaattttctccctcagcgccccgtttcccgaaacatcgagataccgttcgaattcttcaagcttcgccagtgaaacgctgtcctcctttaccggcatataaattacggaacagagtttcatcagcccataaacaaatttcccatggctgccgatatccagaattacgttttcatatccgccctcaccggctatcgtttcaatcagaccttccacctgccccgcatccgtatccgccaaatcctccgggtaacggacaggcggcacataatcaagggcatccagggaatgcacgacgctgttcaggcgcagcaggttataattgccctgactgaaaaagtacagaagatccgctaaatcctctttatattccgtcttcgtaagtatcgaaaggccggaacactcctccagattcaggtaaagggtacggctttcctgtgcgagcagctgtcccattgtgattgccagtgacgttttaaggcatctgcctaccggtgaatagactcccagtatctttgccgccgcccgcatggcggtgcccggaaccgcctccgccgacttctcacagtagcaggccatcacttcacgaatgatattaccgctggactggtacttatagatgctcgggtactccatatcagcctgtaaagtctctccgtccgccaggcacatcactttacccgcccccagttcctccgcctcctcccggctgaccgcgctgctgatcagcagcagctccacaggattctcctttgcaaatttctttaacttgtcaaaggaggaaaatgcaagcacgtcgaacggaatcttctccgtctggttcaccacatccgcaaatctggccgcatagagcggatcgacatcgtatatcgccatgatatgtctcataaagcacctccgtatattgccagccagagacaaaaaccgccccacaaaaaaggaaccaggcgaaatttcatcccatccggccctcctgacgggtaataaggaagaatctgctccgactgaaacaaatgtttaatataattcaggaaatatttgatacgttctgcaagaatatgctgcttcagcatatagaataaagaccacacggccgcagccgccagaccatagaaaataatctcaacccctctgtccatccccatatatccggcaatgacagccatcactttgatatctccggctcccatcatcctgaacagaaaaagagggaaaaaaataattactgtaaaaaatgtacggataaaaaacaaggctatgacggtaaaaactgctccgctcccgtcccctggcgacggccctcgaataaaaccggctatgccgaaagccgccgtgccgaaaagtatcagaacattgggcactcttccttttctaaaatcgcagagagccgagcctgtcaaaaaggacagcaaaaagaatttttccaaacaacctcccctttcctaaattgaatcattccggttacaggcataactaaataagcagagcaaactgcaaaaaacgcaccaaaacacctcgcggaatacaacctgtgaacagtaacttgacggcaactgaatagtacagctggaaaataaacgaataataaaaccagattcatgaatcaagaaataagataaatcgaactgtgatacagttagaatgtttctttattatgaacactttctcctgaaaagtcaactcccttttacaaaaattttcaccaaaaaagacgcttattttttattcatttattccccgctcccctgctgtctttacattgactgaaaacagcaaaaatgataaaataataatagtttaaatttttaaaccaaaggagggagaacggttgcctgacatctctgaactgaaaaatttatttcacgaatgtatgcccctcttcattgcactaggcgatgaaatcaggctgtccatcatcgaatctttgaccgatgcagcctaccggacatgcgacggtgatttttcatctgaaaatctcagccggcacggtttaaatgtacgggaaatcaccgataaaacaaacctgtcccggcccgcagtctcccaccacctgaaattattaaaagacgccggactcatctccatccgccgtgaaggcacctgcaattactactacctgaccatcggccagagcacccggcagcttaccaggctgggcaccgagctccagtcattcctgggcatggatacatataaaaaagccggggaaccgtactccggcgctttaaataaccgtaacgtttcagacggcatgaacagttatgaataaccgaacggttatgcataatcttaccattcctgtatatactaattacagcatccataaactgcacagaaaacgcaacagttcggacagtaagaacggttacggaaaagcgcaatattgtgattacaatttacaggagtgaaaaccatgaaatctacaaggcatacaaaacgcggcatacaggcccgcaggctggatccggaacttctggaagagcttaaaaaggccatgggaaccatcgacaccgccatcaaccgttttgaacaggtcgtggatcccacattgatcgactgttatatttatgaattaaaagctgcgcagcttcgctatcaattccttctccggagcattaaagagcaggagacaaattacagtttgaactgatttatacgcatagcgcgtgctgccgggggaggacaagcatggcacataataataaaacctggtatgaaaaggccgtcttttatcacatgtaccctctgggtatgaccggcgcgccgaaacagaatattgagacagaggccgaaagccgtttcggggaactgaacctgtggattccccatgtcaaaagcctgaactgcagcgccgtttacatcggcccgctgtttgagtcctcgactcacggctacgatacaagggattataagctggtggaccggcgtttgggaacaaacgatgatttcagaacttttgtcagactctgccatgaacaggaaatccgtgttgtcgttgacggggtatttaaccataccggacgtgatttcttcgctttccgtgacatttgtgagaaccgggaatcttcaccgtaccggaactggtacagaggcgtcgattttggccggaacagcccgatgggagatcccttcggctatgagtcatggcacggcatctgggagcttccctgcctgaacttatataatcaggaggttaagaactatcttctggatacggtccggttctgggtccgggagtttgatatcgacgggatccgtctggactgcgccaatgttctcgatttccagtttatgaaagagctgagacggctcacagacacggtgaagcctgctttctggctgatgggggaggttattcacggtgagtattcccgctgggtgaatgatgagatgctccattccgtgacaaattatgagatgcacaagagcatctactccgcccataatgatcacaactattttgagctggcccacaatgtccgcaggctggaagccgtagggaaaaagctctatacctttgccgataatcacgacgaggacagaattgccagcaaactgcttaataaattacacctgaagcccctatatgcgctcctgttttcacttcccgggatcccctccctttactatggcggagaatggggattagaagggcgcagaacgccgcattccgacgatgaactgcggcctgcaatcgatattgcttcggccggcagccgtttctgcggactgactgagtttatcagccgtctgggccggattcatctggaagaaccggcgcttcacggaggagaatacaaagagctgcttctgaccaaccgccagtatgcatttgcccgtctgtccggggccggggatatcatcactgcagccaataacgacgataatcctgctgtaatcagcgtaccattcaatacctgcatgaacgaatgcaccgatctgttgtccggccggacatttaaagtatgtgacggcagggttcaaatagaattagagggtaacgatgcagttatcctcagaataacggagggttaacattatgacgggaagtaaaaacaccggcagtaccaccaggaaatcacctgctgccaaatcaaagatgtccggtcttggagtgatcggcgaattggaccgctattattacggtgaaggacgccattacaaaatctttgaaaagctgggagcccatccgtttacatatcaggggaaagacggatattactttgccgtatgggcgcctcatgcagtatcagtcagtgtcgtcggagattttaacggatggaatcccgacctgaatccgatgatgccggttaaagacagcggcatttatgaagcttttgtaccaggcctggcatccgggcagctttacaagtatgccatcacaaccggcagcggaaaaattctctttaaagcagatccctatgctttcaccgccgaatacaggccgggcaccgcatctgtgaccacagatatcaggggatttaactggagcgattcttcctggatggaaaaacgaatgaaagcggatcctgtaaaatctcccatgtccgtctacgaagtacatattggttcctggaaaaagaaaaaccgccaggaaaaagacggttattacacttacatggaagcggcgcatgagctggctgattatgttaaaatgatgggttacacccatgtcgaactgatgggaatcgccgagcatccctatgatggttcctggggataccaggtaaccggatatttcgctccgacctcccgttacgggacaccgaaggaattcatgtattttgtcaattatctgcacaaaaaaggcatcggcgttattctggactgggtaccggctcattttccgaaagatgcccatggccttgccgatttcgatggacagccgctttatgaatatgcggatcccagaaaaggggagcatcccgactggggtaccaaggtatttgattacggtaaatatgaagtatccaatttcctgattgcaaatgctctgtactggcttgaatattatcatatcgacggcctcagggtggatgccgtggcgtccatgctgtatctggattacggacgcagcgacggccagtggatccccaacaaatacggggataataaaaacctggaggcaatcgaatttttcaaacatttgaacagcgtcataaacggaaggaaagacggagccatgattatcgccgaagaatccacggcctggccgaaagtaacccatagcccggaggacggcggcctcggctttaccttcaaatggaacatgggctggatgcacgatttcctggaatatatgaagctggatccatacttcagaaaacacaaccacaacaagatgacgttcggtattacctacagtacaagcgagaattttatcctggtactctcacacgatgaggttgtccacctgaaatgctctatgattaacaagatgcccggcgaatatgaagataagttcgccaacctgaaagctggctacacctttatgctgggccatcccggcaagaagcttctgttcatgggccaggatttcgggcagctccatgaatgggatgaaaaaacgtcgctcgactggtatctggccgatgaaccgcttcacggggatttacagaattatgtccgcgggctgctgacactctataaaaaatatccggcgctgtaccggcaggataacgactgggacggtttccaatggattaacgccaatgacgccgaccggagtattttcagcttcatccgccgtgatgagacaaagaagaaaaatttacttttcatctgcaactttacgccaatcccccgggacgactaccgcgtaggcgtgccgaaacgcggtaattttacgcttcttcttgataatgaacacggcctgtatgaaaaaggcgacggaccggccgtgtataaatcttcgaaaggtgaatgcgacggacagccctattctttctcttatccgcttccagcttacggaacggccattttcagattttgattaagcaacattaacctgcacgctccgcgcacaggtcaaccatcaataaaagggaattacggacagatacccgccccattggcggccgtccgcaattcccttttattcacactgttccgtttgtgtcaatctgtgccttgattttgttccggcattgcatagcttttaacggcataggccgccgccctgcacagttcaatcatcaggggaagctcttccagcgaaatcgtctttccctgaatctcactccccagtgatttttcacggagcacctgaacggtgtgcaggtgcttctcctctgccaccggctcgatccggacccggaacgatctggtctgtaaaagcagatcagccagattgcttccgggaagaataagctgggtaaaggccggattgccgctctttatcagatactgggaatccagatcacggtagcgcactttgatcccctgctttgttatcatatctgcgccttttcgtaataccgtagagggacgtaaatccaggtggtacggatatgtaagctctgcctgtgtgtaagcagcacaagtcaggccgtagccgtatcttgaactggaggtaataacaggagccacagacaacggagcggtatccatatccaggagcagctggcaatgaggatactgcccctcatacggattccccataaggcagccgccgttcgctttatagtactgatataaaatgcggtcaatatcattatcactgtagtacgaatcgtgcataccatcctccgtttcttattctccatcctccagaagctgctggtagacctcccttttactgactccccgatccttcgccaccagcttcatcgcctctttcttatcccttccttgtgaaagataatgctccatgtgctgattcagcggcatctctttccagtcctcctggccctcagccttcaagtcacggatagaacgcccctcgatcacgatcacgcactcgcccttcggttcatttgcaccgtaatacctgaccgcctccccagcgtcgtacggaaggccgtctcatacttctttgtaagctctctgcatacagcggcgcgcctgtcgcccagcgcctcataaagctcccccagcgtccgcagcagatgatggggagcctcgtaaagtataattgtcctggtctccgttttcagttcttccaggatccactgcttttcctttttatccacgggcagaaacgcttcaaaacaaaatcttctggtacccagcccggatatcgttaaagccgtaatacaggccgcaggcccgggcagtgacgtcagctcaatacctgcctcgcagcattgcttcaccagctcttctccgggatccgagattcccggtgtcccggcatcggtgatcagagccacatttacgccctctctcatcttgtctaccagatacctggccttgtccaccttattaaattcatggtagcttgtcataggcgttttaatgtcgaaatggttcagcagtttgatgctgtgcctcgtgtcctccgctgcaatcagatccactgtcttcagcgtttccagtacacgcagcgttatatcatccagatttccgatcggtgtggcgcataaatatagttttccctgcatagattctccccgcgtccgttcctcgcttttgattcattaactgttataggaaacacaagtttgtcatttcctatatgtccggtttatttaatatccgtatatatcatagatttcgtctgtatacacaccctgctccctgtaaacaatcagaggcttctccaccttaatcatggatctgccgccccgtaccgcctcgatcaggaccatattggcctccttatcgacaaatgggtggaccagcttcatccgtttcggttccagccggtatgctgtaagcgctgtgataatctcaatcagccggtggggcctgtgaaccatataaaaacggcctccgggacgcagcactctggccccttccctcaccacgtcatccaatgtacaaagcacctcatggcgggcaatagccttggcttcatccgggtttttaaggccatgacagtcattcatgtaaggagggtttgtagttaccacatcaaaagaggccccgccgaaaatcaggccggcctctttgatatcgccccttatgatgtctattctatcctttaatccgttaagctccacgctccgcgacgccatatccgccatctcttcctggatttcaagaccggtaaaatgttcccctttcgtctttgcttccagaagtatcggaattatcccggttccggttccgagatccagcgctttctcacccggccttacatcagcaaagccggacagcagaacggcatccattccaaagcagaagccgttctctttctggataatccggtaaccgtttcgatgcagttcatcgattctctcgtgttccttcagattaattatcatctaacttcgattttccttccttgcgttccagcgcctcaagcgctttcagttcggcatcgttcacattaacgcggtcacgtctgcgtttcggtcggaatttaagctgttccaccttatattcccggatttccttctcatcccggtcaaccgtaacaaccactttgactagctggcgcagaacgctcacactgtgaacctctcccttaagtccgtcgtccgtcgttacataatctccgatattcggcagcttgctgttcagctcctcatatgtctcttcttcattcttcagacagcacatcagacggccgcagacacccgaaatcttggtcggattcagagaaagattctgttccttcgccatcttgatggatacgggaatgaactctgacagataggagtggcagcaaagcgcccttccgcagatgccgacgcctcccataatcttggtctcgtcgcggacaccaatctggcgcagctcaatcctggttttaaatacggcggccaaatccttcaccagctcacggaaatctatcctgccgtcggcggtgaaataaaacagcaccttattgttgtcgaatgtatactctgcatcgatcagtttcatctgaagatcatgcttcttaatcttctccaggcaaatcttgaacgcctctttttccttctctttattctttctctccacctcttcgtccgcacgggttgccatcctgatgaccggcttaagcggctgcaccactttcttgtcctccacctcacggttccccagaaccacgtggccgaactcgataccacgcgcagtctcaacgatcacatgatcgcccgtctttatctccattccggccggatcaaagaaatacacctttccggctttgcggaacctgacaccgattactttaatcatatatcaattctccttcattgttaacagcataagctccagggccagctccgtattgacatttgcattgagccttgccttggccttttctatcgaatttaaaatcgtctccagcccctcataggaactcttctggcagaggccgctgacaactccatattcatctttaaatacaagtgtgttgatatccttcgtcaccttgaacatcagaatatcacggtaccaaagctgcatgaaatccagacattcaaataaatccagattatcctcctgcagtttttttatataatccagcagcatggggatgtccatctctttaatattcttaagaagagtcagcacctccttataaagaagggaaaattcctccgaagaagcgagatggatcgccttgcccaggtttcccctcgcaaacgctgcataaatatctgctttactttccggcacttccatcatctccgacagataaccgctgaccacataatccttcagcgggcggagcttgagctggatgcacctggacagaatcgtcggcagaaacacctcctgattcgtcgtcattaaaatgatgaccgcgtaggccggaggctcctctatcgttttaagaagtgcgttctgcgcctgaaccgtcatcttttcagcctcatcaaccatgtagatcttatagccgctgctgtacggtttcaccataatcgtgtcatttatctgaacacggatgtcatccacaccgatgctggcgggcttttcatgcgtcacccagataacatccggatggttgcccgacataatctgtttgcaggagtggcactgcatacatggttccttatcacttttttcgcagagcagtgtcatggcaaatgccctggcgatcgtctttcttcccatcccctcttcacccgacagaatgtaggcatgtgaaaccttgtggtattcgatcgccttttgtaaatggtccttcaccatgtcatgtccgataatatcatgaaaacctgccatatattcctcctgaaaacggtagttaaagcttttcggttattataccacaagattaaaatgctgcatagtattgaatatctggtaatccggccggaatgaattgctgcggggaccgtttgcactttttggagtgcgcatcagtgctaagctcgtaagggacctcgctgagtggctgcgacaaggtccgtcccccgcacttaacgcgtgagacaatcagcggccgcaggccggcggacggggccgatacccccggcggagtctttcgtcccggcgacaaccttcctttggggcggaggagaagatatagtctgcggacgcctttggaatccatcgctgatttgcgaggtcctgtcgagcttagcagcgcgatgcattccaccgagtgaaaacgtgctccgcagactatatcttctccgcagtcccagctcacaacaatcctcccccggaacgaaagactcataaaaccacctcgccccccgtccgccggcctgcccggcagcgtcctcacctgcttaattaaatctcccgtatacagcggcgcaccgtatccgcaagctcctccaggcactgctccattatcttattttcatatcttctttctatccctgcttcccggagcttctcttcgcaaaaatcttcctcatccgccagaaagcggcggcagagttccgcatatttggggttgttctgctgcctctccctctccaatgcgcgggaaagacgttcaccatcctccacttccacataaagaggaaccagttttccgcatccgaaatagtctctcgtttttctgtacgattcaagcgtcccgatcatcaggtaatcatggcggtccaggtcaatctggccgtcatttaccgtacagtagcaccatggtccgaatacagtctcgtacgttctgctctctattaccctgccctctgttttcatctgttcaagctgggggacgctggtaaaatggtactccacaccttctgtctccccgtcccgtatcggtctggtcgtataagtgacaaccgttttcagccctggaaaccgctccagcagctttttatatattgtgtccttgccggacgcactttttcccattacatagaatattttacccattataccgcacctctgtatttatttgccgccatggcccgaaaccaagactcttccgtcctccgtgatgccttcaaccgtcaagccaagccgctggttttccaggataagctccaccgcttcatctgttatcacctcgccgggtaccagcatcggcacccccggcggatataccgtaataaaacctccgctcacggctccggcggcatcctgaaggcacactgaccgtcgttcgctcccccaggcctctgaaagcttgcgctttttctccggggccgcaagccaggtgagcgccgtctttgttccggtgtcccggtcatccggcccgggcccgccgcagtcatcactgccgcaatcctctccgccgcccgcagcctcaaggctgtccagataccggagggcctcctccaatcgtctgaatccgtcttccgtatccatcagggaggtcattaaaagcaagtaactgccgcaggccatctccggctccaaccggaaccgtcttcgcagaatttctgccgcctccgtccccgtaaacgcacatctgacggtgttaaccacaattttcgaggcatccctgtccttaatatgaaatttgccgcagactgaatcatcagccagcctgagatgtttcagtgtgccggcgctttccataaagcgttccagagaggctgcaaaccgatgcatcctctctctcccctcctgctccatataccggatgcagttttcaatggaggcgagaaagacataagaagggctggatgtctgaaaaaccggaagataaccttctatctccgacggttcaataattttgctttttatatgcagcagcgccgtctgggtaagagacggaagcgttttatgcaggctttggattaccacatccgccccgcagtcgagagcggaacgcggaaaatctttcccaaaagaaaagtgcgctccatgggcctcatccacaatcagcggaacgccatgacggtgggcaatctgtgcgatcgctccgatatctgataccataccctcatacgtcggagaggtaacaaatactgcctgtatatccttcctgttacaatccggtccgccggcggctgcaaacgccgcttcaatctcctccggggatataccgccctgaaatccgaaatccgaaacataatcaggataaatatatacaggatctaattggttgagcagcaccgcatggtatgccgccttatggctgtttcttgccatgataatcttcccgcccggacgcgtcagcccgcagacagcgctcaggataccccggtacttccattcaccatataataggtccgatcggccccgtaaacagccgccgcccgctccatggaatccttcagcatcccttccgcgtgatgaagattgtcaaaaccgtcaatctccgtgatatccacagaaaatggattcggaaaagaagttatccccaattcctcccgccgtttgtggcccggcatgtggaaagggtagtggtccgtacccgcataatccgttaatttgtccaggagcattggattttgcccatccattctattattcatcgccgctccattccgtatttccgttcagccgtatctccaggggttccgttgtctcccaggccatctgcccggatgaactgtcatagcttaacctgtgatacaggcagtaaattctgtctccttcagccataaccatctccagcatatcgctgccgtcagacgcaggacggattcccgtatcatttactgttttaatgtctccacccagggaaaccaccgcaatttcaccatgaatatcgtccggactggcaaccgacggtatatattcaccaaaaatggcctgtacgttatcaaaataatacagattcttcatatagccgcggaatggggccccgtgcttttcaagttccattgtctcaaggttcagacggtaaatctggctgccgcattccgcaccgtactgctgcgtcctggcgctgtaatacagccactccccggctatacagaagctgtctgccacaagtccctcctgacgcacaagcccccttgttccggctccgtccttccagtatattttccggtccattccggcatcgtcgatgtaatatgtcacgtccttgctctttcgcggcgccggactgactgatttgatcacgccttcctccagacggtagatcctgtcccctgcctgaacctcgccgttcccgccgtccaacgccggattgcccgatgcgtccagaagcacaaacccctgctcctgcatctcgatcttatatccggcctctgttccggaatattcagccccctttgaaacactctccagggttctgtctttcatataataagccgtgtcgtcccatgcaaaataatgttccacatttctggcaagatattccgtctcatcggtactcagctctcttctgaacagaacctcatccgccagataataaagccagttgtccgtgacctgaaagctctctgtttcaagtatgctgtctgtggaataaatctcttcctgccttccgccgtccggcagcgccctgtatatcgttgtcttgacctgagaagaattaggtatctgatattgactgatataccagagatatccgcatctgaaatcggcctgcaccacgtgtccgttcagaacaatgcaggtttcctcctcaccgggctcctccttataaatatccccgcctttgatttcgtattgtatcatctcatcaaagaacaggttcctgttctccgaaaccgccttattgtcaccaatcattgtcagctcgccgtttctggaaaatgtgagaatttgtttgcccagagcgactgggccgtcggcaagccgtccatccaacttcgtataatagagcttgccgtccggcttctgctcccacccgggattcagcccgccgtcctcaatcgtaatctgagcctccgtgcttgccgctgccgtttccattttaacagccggaatctcttcttttgctccggatccgtaaaatttctgccagcccctgaagagtaccgcgacggtcagaattaaaacgaacaccgtcagcactaccttcataagactgtacagataggagccaaatgagcttttatcctcctccggttcctcctgattaatctccgccttctcttcaatcttcatccacagcgttgcggctgtctcttccttcagcttctggtagtctccatcaaaaacaggccggtcgggttccacccccagcctcttttcagccatacggtaaatttcatcttcaattctgtccgccagttcctcttcgtccacaggcagcgtattcgcatgccggtagagtcttacataaatatccaccaacatctcttttgcctgctcgtccttcacaagagtacaaatcttcccatatgtctcctgcacggtcagaatataaaagttttgaaatgcttccgcgttcccgactcttgccagactcattgtcttttttaaaagagtacgctgattcaaatgcattcctcctttatctcgtcactattcacagccccgctgaaaaacggctgtgaatagtgactttatctcaacgtcatttaaccgtgagaaagcggccattaaaactgatcacctcgatatcaggataaataattttcagctttcgttcggcctcctttcgtccgtcttcagttacatttctgcagcaaatcgtctcccggatcacgccatcctttaatattattatttcatcgcagtaatgcagtgcataatcgggatcatggattgtaatcagtcccccgtaacgatcttcttttataatagcggcaatccggcttaaaatcttctttctgttaccgtaatcaagcgcgctgtccggctcgtcgaacagcatcaccggagcattctgcatcagagcgcggcaaagaagcgccagctgtttctgaccttcgcttaaagtcagaaaatccctgtccgcttcatttcctaatccaatctgttccaaaagcctgcgcgcttcctcccggtgagccgatgaaggcgcttcataccagttcagcctggggttcgcccccataacaaccacttcaaccgttctgatatgatataatatactgtttttctgagggatatagctgataaaggccgccagctcccggcgtctgaacgacggcagctcccggccgcacaccctgacggtaccgcagcggcttggaagcagtccgcatgccgcttttaaaagagtcgtctttcctgaaccgttggctcccagcagagccgtcagacatcccttttttacttccagatttattccctttaaaatcccatccctgccttccgaaccgttctttacaaaaataggcggctctttatggtatgacacatacaaatcacgtatctccagaaggcagtctttctctccattatactcgctcatcctgcacccgtctactaaatgcttaaaggtttcttattcctgcctcatcaggagccatatcatcatcggcactcccaaaagagaggtaagtatactgatggggatctcactcccccagccgacctggccaggcagtctgccgccagtatgataatgctccccgtaattccgcttaagatgcctgccgaaaatccattttccttcagaatcatcctcgcaatgtgcggggcaacaagacccacaaacgatatcgccccggtcacactgacaattccggccaccatgagcgtggttaggatcaggattataatccgtgctgtacggacagatactcccagcatggcagcctcgtcatcggccagggaaagcatctgaatctgccaccggaagaacatgaggcatataaatccgatcagaaccgccggaaccgcagtcatgagtttctctgccgtaatacttgaaaaacttcccattgtccagtattcaatcgatgcaagctgcctctccggatcggccagatacttcatggccataataaaagaatcagccagggcccgtattgcaattccggccagcacaaaatcggagacagccttttgccttgacattcctgccagagccaccgccgcccccacagcaatcaggccgcctgcaaacgcactgcccacagccgctcctgcattttgcccgaaacatacaattgcaaaagccgcacctgctccggcgccgctcgtgactccaatcagatccggcgccgccagcggattgcggaaaatatcctgataaatagagccggccatactgaggccggctcccgctataaatgccataaccgtacggggaagacgaagagtaaaaaatacgctctttgccgtctcatctgttccccgtcccgacaatatatgccctatttcctgtattgtgatcgggtatctgcctgtacataaagataccgtcagaaatatgattaacaggaacaggctgattatatatatttttttcgttctgttatgaactgccatgttctcttctctgatttatcattattgttgttactattcaatctcatgccggatcagcgtgtaatgagcgccggatcgatctccacaccgtaaaattccctgtaaaattctgcggcttcttctcggaattcatcaaacggatagctatcctcatgaagaatcgatgaaagccacatgcatcccagaatcccggacggcaccggggaatcccaggcctcaaaggaagaaggcatctcgtacacacggccattttgaacggcggctgttcctgccagctgtccgtccttcagtacgtcttctttcgtatactccgcttccggaattaccactataacttccggattataagtaatcagctgttcataggatatatcggcccacccgttatccgtaaggtcagcggcggcattcaccccaccggccagctctatcagactgttctggtacatctgcgtcgtggcagccctcaggatgcttctggtcccggcaatataaacctgcggtttatgctccccgctcccagcctgtccggtaatcccggccagcttctccttcttggcccgtaccagccaatcagcgcctctgcccgttcctgtgtgcctgtagccgccgcaatgctcctgattgcttcctccagaccctccatactttccgggttcacgaccagcgttttcatgcccattccttccagtatcccggcctgctccgacagttttttcggcaggatcacaagatccgggttcaatgcggcacatccctccagatcaaattctttcgccgtacccacgctgggcagtccgattagctccggcgccgccagtttgtatatcggccttttatcggctttggcttcgattcccaccatcttgtccttaagtcccagggcaatacaggcagatgtcgtaatatagtatccgctgactatccgctgtgccggctggcttttacctgcttccacagcttcctccgaaacggatgtattcggcgtttctgttgcttcagttgtttcttttgtctcttttgtttctattttttctggtgaggcgcagccggtaaacattgccacaaccataatcatggccagagccatgctgatccactttttcatactctttaattttgccatatttccaacccctattgcaagtattttttataagaactatctgattactgtaagcgtgttattgttcgcagcacgccgctttttggcggggtgtgaacagtaacactatctgagaacctgatctccgtctttgacacagaggtttcgcttaacccctaattcctccatccattttctgactgtgactgtcttccacgggcctgcgtcaactacaccgttttttacattatcccaaagccagtccggtgtgggccacagacaaatctcaggtttaatcacccggtaaacatccatttccactccatcctgaccgtgatgagccatctgaacaatatccgcttttaaatcctcgggtttattcttcttcagaaggttctgccccgcatcccagcccatatcaccgagaaaaaggattctctttccgttcaaatccaggcggtatgccacagaactgttgttgaaggtattgtgaagacttctgaacggtttgttcattacgttaattgtgacttcatccacctgaatctgctgccccttatcgattgaggggtgaagcttttcgggcgccacgttattaaaggccgccagcaggttatcgaggttgtccatccggcccatatgctcgcctctctgataaaattctctttctaaaaaagaataataaatattatcaatctcaaccggtattggctgagtattcaaaatctcggtcagcgcgccgatatgatcgctgtggggatgcgtaatcagccaggctgaaacccgccctcccttggcctttatcgtctcaatcagatgaggcgcatcctccctgagtccgccgtccaccacaatcagacttccggctttcgtctggatcacacaagaaaggttctggctctgtgtggcaggggccagcagtgtcagctcagctcccccaagataggattcctccgccgtggatgtcgtatcctgcagcgctgctccacccggattctgtgccgcggcacccgggttctgtaccgccgttcccgggttctgtaccgccgttcccgggttctgtgccacagcagccggaccgggcgccggcggtataacatcagcataggtcggtactgcaatcatcaatgcagccgtcagatagattcccaccgctctttttacccatatatttatcttttgatttaaatttctcttcatgtgtctgtcttttcctctctgttcatccttccgcctgctaaattcgggcggaatttccttacacgattataacagttagccgggacaaagacaacttaataaattctgtcaatccttgagaaattctgacagtgttaaaagctccttgtctgccggtacttaacaaacgataacctgcacgctctgcgcacaggtcaccgccctatataaaagagagaatgcgcattttatcatgatgcggattctctcttcattctcaatattctgtattcttataacaatatggaatttaccccattttactgacaaatctcagcaatcgccaaagcgaataactccgcgctcctaaccatctcgtcaataatcaggtactcgtcggctccatgcatatgataatcagttccgagcttcatgcagccaaaggcaactccattttccagcctgtgtgcataagttccgccgccgatggccatgcagtatcccttttcccccatcacctgttcatagcaggaaagcagtgtctgcacaaacggtttatcctccggaacgtggtggggcggggtcatccggctctccggatccatctggatcccctcagcatcaagtcttgccctcaggacgtccagcatattttcctttgatgcacagagcggcgcacggctgtctatctttcccatcagccccgtaacctgataatccaccatattcgtccccaatgtcagaacgccggatatctcatccttttgtgccacgcctgctgccacaccgtaataatcattatgaggaaatatctctgccagcccattcaaggttctgaatccggcgctgtctgacagaggaagggacgccgctgccttaatcagtccggtcaccgcattattcccctcccatggggttgatgcatgggtgctggttcccgtcgcacggatgaaccatctttccccctggttcgcagacacgtccggcagaacgggctccacggtaaaatgaattcctgtttcattctccgttttcctgcatatatcccggattatctcgcctgataaaccttccactacagcttccgcccggtttggcaccacattgcccgccgtacctccgttgagggagataagcctcggcagggctgtttcttccttccactgagcgctgtacttcgtataaagaccgcccttttcaatatttatcagcggatattccgcatccggtgaaaaggagcacggcgcttctgcgaatttgctgtaataatactccgtgtccctgcatgccgtttcttcatcggcccccaatatcaggcgtgcatttttcgtcagcgtaattcccaggtcttttacagccttcattgcatataatgctgcaatggccggccccttatcgtctgaagaacctcttccatacagtcgtccgtctctgataaccggcacaaacggttctgtgacagtccagccgtcgccggcgggcaccacgtccaaatgggccagaatatccagctcggcaggctgttcatttaagtcaatcaccgccaccttgttctccagtacttcggccttcaaccccagctctttcgcaagcgaagcggcaaaagcaagcaccttggcattttcttcaccaaacggcatacccggtttttccggaccgtttacactgggaatccggattacagccataatgtcatccagcatctcctgtttatggacttcaaaatattcttttattttctgatacataatttccctctgttctagagcgtgtctggtactgcggtatcatatttaacaatgccttcaccgtacagtactgctcctactattcatacagcctgcatgccacatgatggcccggctccacttccttaaggctgaaatttctcgacctgcattcatccgtggcatggggacaccttgatgcaaaccggcagccggccggcggttctatcgggctcttaacctctccctttaatatctgtctcggttttccacgcatcgacagatccggaatcggaattgcagaaagcagtgcctgtgtataaggatgcatcggattgacaaacaattccttactggatacccgctccacacactgtcccagatacataactgcaatctcatcgctgatatgtttgacaacagacaagtcatgagtaataaacatataggtaagaccgatgctgtcctgaagatccatcataagattcaggatctgagcctggattgatacgtcaagggccgagaccggctcgtcacagacgataaaatcaggattcacagccaatgctctggctacaccgattctctggcggcggccgccgtccagctcatgaggataggcgttaataaaacgctgggccaggccaaccgtctccataagctgttccactcgtccctgaatttctcttttatccgtcatcaatttattggcaatcagaggctccgcaatgatttcgcttaccgacattctgggatttaaagaggaataaggatcctggaaaatcatctgtgccctcattctcatggttttctgtgccgcgccgtgcaacttatacatctcctggccatcgataaacacctggcctgaggttggttccagaaggtttaagactactcttcccagtgtggattttccgcagccggattcccccaccacgcccagagttttgcctttttcaatgctgatattgacatcatcgactgcatgaagcatgcctttaggagttttaaaatatttcttcaggttttttgtctctataaaagccatcagcacgctcctccttccttatcatcggtcatggtatgatcgtccgccatcctggtacagcggattttatgggttcccgaatggtatacccctggttccgcctgcctgcatttgctgctgcagtacggacatcgcggatggaagctgcatccgcccggcagcgccgtgggatccggcatcagccccggaattggtttcagtcgttcagaagtatcattcagcctcggaatcgaattaaaaaggccttcggtataagggtgatggctcttttccatatcgaagatgtcttcaaccgtaccgtactcaataatttctccggcatacataatagctacatcatcgcaggtttcagctacaacgccaaggtcatgggtgattaaaatcatggaagtattgagtttatttttcagattctccatcatttccagaacctgtgcctgtatggtaacatcgagggccgtcgtcggctcatccgcgattaccagctccggttcacagactagggccatggcaatgaccaccctctgcttcatgccgcctgaaaactgatggggatattcactcttgcgctctgtagggattcccaccatttcaagaatctcatccaccctcttcataatttcagggctgggctttccaagcctttttcccggccttttcccgctctttccccctgctgcctcatggagctgcagcacctcggcaatctgatctcccacggtgataaccgggttcaagctgctcatcggatcctggaagatcattgaaatcttctctcccctgacacgctgcatttcttcgatcggaagctccagcagattcctcccgtcataggtaatactgcctttgcggatattgcctgttctctcaggaaggagccttaaaatactcatggcggttgtcgtctttcccgcaccggtctccccaacgattcccagagtttttcctctgacaacgccaaaggagatattattcactgcgtggacaattccttcctccgtatcgtatgtcacttccagatcctttatatcaagtaaaatatcattattattcattgtcatactccttccgtgttcaccttccggcctttactgtttcagcttcggatcaagagcatctctgagtccgtcgcccaggaagttacatgccagtaccgccatcatgatagtaacgcccgggaagattacaaggtacggatagtcacgcataaattcctgtccctctgtaagaatggctccccactccggctccggcggctgaacgcccaggccgataaagctcatggaggcagctgtgaggataacaccccccagcgccagtgtcgcctgtacgatgataggtcccatggcattgggaataatgtggcgcataataattcgggctgtggatgtaccgccgcactgcgccgcttcaataaactctgaacccttgattgtcagcacggaagaacggacaatcattgcaaactgcggtatcatggaaaccatgatggctagaagcagattcataaccccggttcccaatgcggatacgacacagatagcgaacagtgtggatggaatcgccatcagcatatccataaaacgcattactactatatcgattttcccgccgtaatagccggataccgctccgactgcaccgccgattatcatcgcgccggccacggaaacaaagccgataaacagggaaatgcgggcgccgtatacaattctgtaaagaagatcacggccgtaagcatctgtgccgaaccagtgtgacaggctgggcccctgaagcttattctttaagtcatgtaaaataattttgttataatcaaccgtaaatccgatagcaatcgaggccacaatcatggtgacaattataatcaggccgattacagccagtttgttttttgtcagacgatgccaaatcatagcaagctgtgaacgctttttcgcagtctgtaattctaacgttgttttttccacgatgccacaccctatttcgcgtactgtgctttgattcgcggatctacataggcgtaaataacatccacaatcagattgacaagtccgaacataactgccagaagcagcgtacatgccataacggccggaacatccttggagcggatagaagtaatcagaagctggccgataccggacattccgaatacggactcagtgataacggaaccgcccagcattccgccgaagttaacgcctacaaccgtaatgagcggaatcagcgcattgggaagacagtggcggaaaatgattctgctcttttcagctccttttgcgtatgccgtggttacataatcctgacgtatgacttccagcatggtggaacgcgtcattcgcaggagcgtcgcaaaggtggacgccgaactggtgatagccggcagaataaaatgcgcaaaggaatcggaaccgaaagaaggaagaattcccagctttgctgaaaagagaataatcagcattaatcccagccagaacggaggcatggatatgaagccaagccccaaaaccgtagtcaggctgtcaatccaggaatactgtttaacagcggaaagaattccaagaggcagaccaatgattgttgcgaagaaaacactcagaaccgcaagcttcgcagtagtcggaaaacgtcttacaatctcttccactaccggcatgccggtacggtaagaaattccgaaatttcctgttaatacatctcccatatatctgaaatatcggataatgaacggatcatttaatcccatctgttcgttcaaagcggcaatggcgtcagccgtcgctttctcccccagaatcagacgggccggattaccgggcataaagctcataatagagaaaataataaatgaaatgccgacaataaccggtatcatcaaaagaagtctttttgcaatatatttatgcatatccctctcctatctcaaactgcttctgatttcattcgtcccgcctccggcataacaccgcggaggcgggacaaatcatcatttaatcaagtaatatccgaaggtatcttattaccagctgaagtcgtatacattatagaatgaccacggattaaccgtaacccccttcaggttcttgtttgttgcaatattttttgttccgcttaaggttggtatcattggaagatccttgcttaacttgatcagaagctgttcatataatgcagctctttgggtttcatccagagttattctggcttcatccagtaaccggtctgcctccggatccgagtatttactgtaattgcggacatccatctgactggagtggataccggaatacagagcctcatcaattgtcggcgccgtaaatgtgccgccgtcaaccatgatatgggcatcaccgtttaagcacgcgtcgtcataggcggagcgttccatctgagatacattggccttaagtccgatttctgcgagggaattctgcaatacctgtgcgtatttggaagcttttgtatcatagacaataatggagatttcctggctgccatcaactcctgcttcagcaaataaagcttttgctttttcaagatcataaggatatttttctaccttatcggtgtaaccgaggtatttatctgttgcaaacgtatccatgattgtaccgtttccgtccaaaataccgtataacatggattctttatctgtcgcataggccagagcctggcgcgctttgatattgtcaaacggagccttctcgcagttgatggttatgtaattgagcccaaaggtatcgcctgtgtgaagctctaatttgtcattttcctggatccgtttgaagctggtctgctgaacgtctacgtaagcgtcgatatctcccgattcaaggctgagcactgccgagttcgggtcggtgataacacggtattccacatgcttaatcggaacctcgcccatatggtaattttcattggcttcaaggactactttctctcccgctttccagtctgcaaccttataaggagccgttgtcacaggattctttttaaatgcatcctctcccatggactcgaaggccgtcttgctgaagatgcctgcggtcggaagagccatggcgaataagaactccggatacggaccatccaggataaccttgacatggctgtcatccactttctcgacacccgttacacgggcaaagctcggaactgccatcggcatttccatacctcgctccagcgagaagacaacgtcgtcgattgacatgtctgttccgtcggtaaacttaacccctgatttaatggcaaaagtatactctcttccgtcttccgatatctcccatgattctgccagacacggtttgatttcataagtctcgttatccatccggacaagcggatcgtaaacacacatattaatacgcataccgttatcatttaagttatcgtgagtgtcgaagttcggcgtgtcgccataatgcccgataatcagagtatcttttacttcaccgcttgcgcctgagccgccggcttcctgcgtcccgcctgcatttcctgaacttgccgcattaccgccgcaccctgccagggagactgtcatcgctgctgctaaaataaccgccagtaattttctcataatacatcctcctttgatttacttagaaaaatcaaaccagctctccacttcctgtggctgcaggtattcagttgtcacagaatctaattcaaagaactcctgatacggatccactgccttatatgcctcatacggcccgtcccagtctttgcggcgttccttataagcgtgatgtccctccagagactcatattcaaacatcattacaaataatccgttcggatttccgtcccgatccgtttttctgtaatattttgcgcttacccactcagggaaaagttcctgtctgttttttacgacaaacgcgaaccagtccttgatgattttatcgtaagcttccatatcgatgtcttttttcaatctccatgtttcgtactctaaaaaacgcatttaaaacccctcctttattttcaatacagaacttgtcccttatttcttatctgtatcaagccagcgctccggctcaatcggctgccagtatgtacatgttgtctcatcgtaattaaaatagtgatagtatggatccaccagcttataaggagcatacggacctttataattccggcgcttcttgtatgcatgatgcccgtccagggattcatattcaaataccataatgtaacggccggaaggaactccttctatatccgtctctttataatatttagcgctgatccattcctggaataattcctccttgtgatcatggagaaactggaaccagtcgcggagcatctggtcgtattcctcaatgttcactccctcttttaatttccatgtctcatattcataaaatctcattgtaaccttcccttcattcacagtagtttttcttactcaaaacctcctgcatcatatacacccccgtatttatatcaaaaacaggaatgtgaaactctttcgtaatctctgctccgaatacagccagattactgcattccagcagtactgctcccaggtcgttgcaggctccgctcagatgccttaccccgttcagtacatcctccttcatcctgacgtaatcctgttttgccgttccctctatcacaacttctttaaaatgaggttcattctgcattccatagattataatcccatccggattccctgcgccggccgccctcagatgatgttctccgagaagagccgagtggcctgtcagaattccaaccgactgtcccggtgatatcatcattctggcaaagggaagaaataaaaggctggaagatatcacaggaatcccggctgaatctgctatctgccgctggtagagggccattaatccacaatcccctgcaattgcggacacattcttttttgccagcttttttgcagcttcgcaaagtctcctgcacgcatcaggcgagccttctattaaatctctgtagcttccttctacaatgccgtattcgacaggaaattcaaatgttcccggataccccggatctcccttcagcctgtcgccggccgtggcgaatagtagaactcctatagacatcttcttccccttttctcaatataatgattacggtttatacagataatataccgtccgcactcatcagaacagctcgcttaaagctcccgatgtgaactgttccacttcaaagtggtatccctccgggccggtgaagaaaaatgacttgagagctaaatccttcacctgcttgatctctgaaagcccttccacccctctgctgcctttcagggactcatgaacttcctcaatattgtctaccgtaaggctgattaacacactgtctgtggaagtcacctgaatggaaccgctgtggttgtcgacggctcccagaaatgctttgtcacggagccggtaaactgccgcccagcccggatcataagccttctcaagccccagaacctcttcaaaaaatggttttgcagcttctaaatcattaaagtataaaaatgtgatgtttgacgttagctgaaggtttgccattctttaactcctcttatttcttatagtccggctctctgccgatttccttaataagctctttcatcgcgtcaatcattgtgtcgatatctttctcattgttgaaatactggcaggaaatcctgaatccgccgataaaatcagtaaacctctgtgcgatgaaaattctgcgtgcatgaagctttttaagaatcattctgtccacgtcaagatcgtcatacaatctagcaatcacaattccgccaaaatgtcccggatctctgtgggtgatcagcgtcccgccgatttcttcaattctgtccatacagtatacagctatctcacgaacccttttttcaatgttttcaatgccgatttcattgacaagagcaagagattctcctaatgcgatggctcctgtgtagttggatgttccaccgatttcaaattttcttgccgtgttgtcaaatgtccagttattgaccgacggcgcggccggattctcccagtatgcgccccatccgccttccggtacggttgtgttcagatatcccgcataggattgtttcagctttggaagcgtttctttatttacataaaggacgcctgttccgtacggagaattaagccatttatgcccgccggccgtcagaatatcaatatggcatgcctttgtgtcaatctttgtgactccaagctgctgtaccgcatcaactacaaggtaaacgcccttttccttacaataatcaccaagttctttcaaatctgtctgccagccgttgcaccattccagagtagacataacaatcagcttcgtcttatcatccaccagggctgcaaaatccttggccgtaaaacggttatcctctgttttacaaacgcggatatcgatgttcttgtctttcctcataacacaccagggcagagccacctggataaattccagattggttgtgataatgttgtcaccatcctgtaattcgataccctgagcagcaatattaagaccatgggaagtactctcaaccagagcaatctcttccggatccgcattcagcagttttgcagcctcatcataagccttatgtctgagagaatccattgcaatatggtgggcgctggagtttgcttcctcctgtaccgccgtcatatctgcaaatgcctttactgccttcacggtacgctgaggggcgaagcttacacacgctgcatccaaaaatgtcatcgtttccagtaccggccactcctctttacgtatcttctcaaaatcaatattcatttcaataatcctccttgcatacatttccgttaaagctgtcccaagaccttttccgtacgtatacattcatgcatgtttgtatatttgtatagtatcagttttctgtttacttgtcaattgctttgctttattttcataataactttttatttatatttaatactgtatgttataaaatcttttatataaatccaaaataattatgtagtttttttattcttattagtaaattaagagaaaaaattcatcgaattttcagtaaatgagaagtgaattatttaaatacaatctttttccggcataatttttcctgctgccgctgtgcgttccctgcacagaggtcagcgccttcaataataaaacgcataccggcaggattcccctgcggtatgcgttaattaactaatctctattcatttaatctgctattctctcaaaagcagatagacatatttccgtatcagctgtttgtttataccgatcgatatttcttttggtatatcctgtatgtagacgccgtccagcgcataaaacatgaggaaggtcagttcatcctccgagatgtcatccagtttattatttctggcctttatccttctgattggatccaggaaataactgtactggcgttttttatcctccagcatcttttctcgcaattctgaaaattcaccatggccctgaacgtaagccatcgtctttcttacaaaacggaaatcgtccgtcatacggttcggcagccaaagaagctcaaccaaaatttcctcatccttcagcccgttattgtgagcaatattctttacaacagcggcatggatgcggttcagggtttcaatcaccgtattctcaaaaatttcgtatttgtttttaaaatgccaataagccgcccctctcgtaacctgggccagctgacatatctgctctaatgacgtcctgtcataaccattttctaaaaacagctgaaatgctgcttccagcagattctgctttgtaagttctgcatcttctttcgtttttctcataaaaacgcaatccccctcgattgtttattttacatgcatgctgaatgtttttacgaaagtcggtcttacaaaggcatattctcttttaagtctgatatcaaatgtgtcaaaatatagaacttctggaaccttctgtatctcttacatactatcatgatcttatctatctgtcaaattaaactcctctttcaaaaattcaataaccctccttgcagccagcggaacataattcccctgcatcagagcggcccaaaagccaaaaggcacgctgtattcatcctcaatcagaaaatattcccgctcccgcagcgccgccgatatctgccgctccggaagaattaccgtcgcataatccacctgcgccagcgcatccaatgtactgagattgcgtgatacctgcctgacctgcggtataattccggctttggcaaatatctgttccgtcgccatacggctcctctgcctggcctgtgtcagcgccaccggctccttttccagaaaatgaatatccagataaggcttatcttcacccggctttctgactatgaagcttctgtaatcgctgttgctgcgcggaaccaccaccatcctgtcatgaatcagctcaaaacattcaagccccgatgagaggacaggagggtggagaatggctgcatcaatagctccggatacaagcatctcctctattttatcgctcggcgcctcctccaggacaatatcgatcagagggcagcattccttaaaccttgggagaaagtgaggcagcacacaggcagcctgcgcaccggtaaaccccagcttcaccacgcctctctgagcatgtctgatatcctctatctcctttttcatctgctgttcctcatgcagcgttctgtgcacaaactccagaaaacgctgtccctccgccgtcagtgttactcccgacgccgtcctgataaataccgggattcccagctcccgctccaccttctgcacgcactggctcagcgccggctgcgcgacaaacaatctggctgctgcctttgtaatgcttttttcttcggctatcaggctgatataatgcatgtcctttaaagtcatactctcctctttcttcagaaataacagaactgcctttctgcttacatttctccgataaacacaaattattacttttcgcacaacgtacttcgattttagtacaataatacccctatgtcaaaccgggtattttttgataattggaataatatttctatttaattcacttaatgtatgatatatcaccctaaataaaatcttcaatatcttttatttcaaatttatagtatacttattccagagaaagtacaaaggagacggcgccgatgaaaacaattgcagttattgcttatgataaaagctccgttcaggtatatgcggatcaggtaaactactttatgggaaatcgggcaaagaccattctatacagtgtgaaagataattttatcagccaaataatgccggctgatctgtatttaatttcaacgtgtgcctatacagagcttaacaatataagaaagtatctccccttaaaaggagaggttgtcatcatacgggtcacaataagaaaaaacagtctcaaacagctattgaaggttcccccagaactaaggcactgttggtaaatatcagccacaaaatggcgattgaaaccatggcgttattaaatcagcttggcgttgacaacatagatttttatccctgcagcccgaatgaggaatattcgcagagtatcaagtttgccgtgaccccgggagaaagcaggtatgtcccggaggggatcaccgatattttggatatcggccccagaatactgagcagcgaaaccattgtagagatgatgctgaaacttcacagtgaagaactgatggaggaagacagattaaaggagtatttccaggaccttgtggatgacaattacaattttaaccgaatgtttcagcgttccgtgcagatggaaggactgattgacatacttcagagcacgctgaatatcggcatcatatgcatggatggtgattccgtcatattcttctttaataaaaaagcagaggaaatactcaatttgacaaagcagagagtattcgataaaaaagctggcgatgtacttccgtttatcccgtttgaagaatgtttttccacacggcgtgaaataaaggaacggatgctgaaagtacagaatgtagatatctccctcagcattgtaccggttgtcagaggttatgattttataggcgcaatggccacaatacagcgtttcagcgatgaagaattccggcagcataagcttagatgccagcttatgaacaaaggccatgccgccaaatatacgtttgattcgatagcaggtaccagcccggctatctcccgggccaaagagatcgccgctaaaatggcaaaaagacctgctccggtactgttgacaggtgagagcggcaccggcaaagaactcttcgcacatgccatacatgcggcctcggaccggagcgaatatcctttcgttgccatcaactgcgccgccatcccggataatctgatggaaagcgaattattcggatatgaagaaggagcatttaccggtgcaaaaaagggcgggaaaatgggatactttgagttcgcccacaaaggtactctttttcttgatgagattgaaggaatgagtacagctcttcagctcaagctgttgagagtcatacaggagaaagaagttctgagagtcggtggaaaccgtgtgattaatgtgaatgtaagaattattgcggctaccaatgaaaatctggaggtattggtacaaaagggggaatttcgaaaagatttgtactaccgcctgaatgtgcttagtatagagcttcctcctcttcgcgaaagaggaagagacgtattacaattggttcataagttcagacaggaaactgaatctacatttgtgctgtcatccgagacggaagaaatactgctcaatcagacctgggacggaaatatcagacagctcagaaattgtctggagtattttgcctgcctggataaaacggtaattaatccggaagatcttccgccaagcctgtacaccaaaaaggatagttcagcgattttgcaaactcctgataaaaacttccgccaatattcggccgagtccgcagctgcgaaagagcaatcacagtcaccctgtttttttcaggatacagatgctttacaggaattcctacttcgtgaaatggctgcccgggcaaaagatggaaaaagctgcggcagacgctatttgatccagaagataagaggatgcggatatctaattacagaacgggaattacggggccaattgaaagatatggaggaaaaaggacttatcgatatcagccagggccggggcggcagcaaattaactaaaaacggggtaatgtggttaaatatgcgtatcaaatccagttaaacggggtaattgggacaagttcgaaaaatgcagggttctcgaaaatctgtaaaccctgcatttttgctgcatctaataaggctggccgcaaaataataagactattttaaagtataatgtaatttggcacaaaacttgctcttatattatgcagcagactttgataaccggccggcaaagcttgtacaaaaagaaaactggagatgacattatatgagatacaattttgatgtggtgacagacaggtggaacagtaacgcagtaaaatacgatgaagctgaaaagaagttcggaaggaaggatctgattcccctctggattgcggatatggatcttccgaccgcccagccgatcatcgatgcaatggccaagagaaatgcacagggaatattcggatatacgtcacggcccgattcttatttcgaatctgtaagggaatggcaggagaaaaggaacggctggagctttgatccgaagctggcatctttttgtcccggtgtagttccggcactggcaactatggttcgcgaatttaccaatgagggggataccatactctttttcacaccggtttattccgaatttttcgatataacaaaagattggggaagaattcccctgaccgttcccctgatacaagagcagggcgaatacggtatagactttgatgcatttgaacaggctcttcaaagcggtccgtccctttttattttctgccatccccataatcctctggggcgcgtctggacaagagaggaactggagcagattggtaatttatgtatccgatacggagtccctgtcatatccgatgagattcactccgatttgatgctctggaattataaacatatccctatggcttctgtcagtggagatattgctgccaatacaattacctgctcttccgctacaaaaacatttaaccttgcaggcctgcaggcctcaacaataatatttccggataaagcaagaaaagaaatatttgataaattctggcacgatctggatgtccacagaaataactgtttcagcgttgtggctgtggagacggcattccgcgaaggtgaggaatggcttgagcaggtactgctgtatatagaaggtaatatgcgatatgtaaaagaatatctggagacgaaaatccctgaaattcaaacctatcttccggacagtacctatctgatgtggctggactgccgccatttagatatgacaggagacgaattggtggattttatgatcaatgaggcccgtctggggctgaatgacggccgttccttcggcgctccggatggctacatgagaatcaatgtcgcctgtccccgatgtacgctcacagatgccttagcccggctggaacaggcagtggagaaaaggaggaagaaggaacaggcataacgggcgataaacaagccttattaccaggaggaaaaagagatgttaaaggatactaaaaattacgtgattgaacaacggcggaaattccacaggattccggaagtttccatggaggaaaaagaaactgcagaagccatccgacaggagcttcaaaatttggatattccctttgaaaaggtgggtgaatatggcaccgtagcctgcattaaaggagtgggtcccggcaaaacatacgcgtttcgtgcagacatagatgcgcttcctatacaagaggagacagatgttgagttcatttctgtccattccggcgtaatgcatgcgtgcggccatgacggacatattgcggtacttctggcctttgccagggaacttgcagcgaaaaaagagacattaaacggaacctgttatctgtgtttccagcagggggaggagatcggaaagggacaggatcagataatctcttatcttaaaaatgcaggcggtataacagcagtccttgcctgtcatttatgggtagatattccggtcggtaaaatctctctcagaaaagggccggtgatggcggggacaaccagtttccagatccggataacaggaaaaggctgccatggctcccggccggatcaggggatcgacccaatcaatgcggcaataacgcttattggacaggcaatacggcttaaggatcgcgaattcagccctcttcagagcaatactctaagcttttgcaagtttcacagcggaaaagcaacaaatattattccggaagacgcagagctgggaggaactatgagattcttcagcgccagtgaacgcgcacagttattagatgtcattgacagaagctgccgggcgactgaactgctgaccgggtgctcaattgaatggaaaaccctggttggtctgccgcctgttgtgaatcacggtgattgcatcgatcaggcccgcttgtctgcagaatcggttttcggcgctgacaatgtaattgaatttgaaaaaataatgggggccgataatttcggctgttatctccaggaattccagggctgttacgcctttatcggcattggtaacaaggaaaaaggcatctgcaatgcgcaccataacagcaaattcgatatggacgagggggcactggaatatgctgtgcggttctatcttgactttgtagaaaagaatatgtaaaggagaagggctatgagtaataagaaccagacaaaaacaaaccagccgcagctgacaggcatcctcggcataatcgagaggacgggtaataagatacctcaccccatttatatgtttattgcttttttctttatcgtgctgggcttatccgccgttttggccgcagcaggttttcagacggtgaatccggtaaataacgaagaggtaagtgtcgtcaatttattaacggctgccggaattgccgatatattaaaaggatttcccacagaatgggcaggtttcagcccaattggagcagtatttgtcgcaacccttggactcggcgtggcaaatgggagcggttttttaaatggcacgcttcgcctcgccagcaattttaaatccaagtttctcgtcacagtgctcgttgttctcatcggtattaacggaaacttgataggtgatgctgcatttgtagtatttcctcctctaattgctattttatacatgaacctcggcaggaatcctctggcaggattatttacggcttatgcctccgtagcctgcggcttcggagcgagcctggtggtcggtaacggcgatgccatgctggccggcatgacggaaacagcggctcagcttgtagataaatccgctgttgtatcacctgccagcggttattatttcatgctggcatccactctgattatgagcccgattatagcctgggtttccattcgatttgtagagaaaaagctggatggcgtcggtatgggcactgaatccgaattaggggatgatgatcgatttgaaattcacttgaacgacagcgaaagcagggctatgaaaatggcggccctgagccttgccgctcttgtggctatactttttatcatgggaatgaaaggtttaccgtttgcaccgccggatggaaaatccttcgcatacagtccgatgttaaaatgtattcctgcagtaattctattcgtatttgccgttcctggttatgtatatggcaaaatcaccggtacaatcaaaacatttaaagatgcgctggacatgatggcaaatgagattaagagtatctcacagttcttcctgatctgcttttttgcctgccagtttatcgccgtattcgccaaaagtaatattggaacaatcgttgctattaaatgcggactgtttttaaaagacagcggcattcagggggtgggacttttccttttgtttgtattccttgtggccctgattaacctgtttgtgagcagcatgagcgctaaatgggctatcctttctaccgtatttgttccaatgctgttaattgccggcatcagtcctgcggcaacccagatggcttaccgggtcggggacagccttacaaataatatcacaccgacctttgcctatctgggaatcattctgacttatgcacagaaatatgacagacgggcccaaacaggaaccgttatcgcatatatgctccccttttcaatttcctttacaattgtctgggtagggctgctgattatctggacccttctggggcttccgattggcccgggtaccacgtgtttttataaatataatataaatgataaaaataggaggatcgactatgaaactacaaaagaaattattgggaaccgcggtggctgctatgctggcgctcagcgcctgttcttctcagcccacgactccggtggcgccaacaggagaatccgggccagaaaacacggcagagttacaaacagaagctaaggcaaatgaaggcactgacaatgaagtcttggaagcacctgagaaagtaaaaggagaaaccctggcggctgaagatattgatccgaacggcggggctgaccttaacggggcaaatgatcataaagtctcaaaatactgggttaacccggatttttataatatggaatcagacgaagaggtgacaattttaaagaactttaaaaccatgcagcagaccagtgaattcagctgtgcaccgtcttctgtaaccatgtcactggaataccttggagtaccaatgacagagtgggaagcagccgtaggaatgcattgcaatatggatgaagatgtggacggagcgctgcccggctccgctgacagctggtatgaacctggcgctaatataggcaaaattgtaaactacctgaagaccattccggatatagaaattgtcgaagctaattatattgaaaatccgaccgaagatgatctggttggggatgaggatattgcatctcttaaatattctcctgtcatgaaaggaaattataagaagtattttgactcctcggcactatattccagtgaaaacgatccaaataccgataagtgggttacggatgcaaaggattctttctttgtaaaatggctgaccggtcacataaaagagggtcatccgattatcacccatacgaacctctggaacgggcactatgttgtaattattgggtatgacaacatgggaacaccgcagcttggtgacgacgtattaattattgccgatccatatgatacgtgggatcactggcaggacggatacattgtgcagccggttgaagaattcttctttgagtggaatgacttcaatattgcccaaaagccatatcagcttcagccgtttgtggtcgttggaaagaagagcaactgattttaggcggattggggaaaattgcatatgagcaggaaaacagtaattatcggcggcgtggctggaggtgcaaccacagccgcaaggctgagacgcagagttgaggatatggaaatcatcctgattgaaaaaggcgataacatttcatacgcaaactgcggtctgccatactacatcggcggaataataaatgacaggaacgagcttctgctgcagacaccggaagcgatgagagcaaaattcaacattgatgtccgcgtggctaatgaagtaacggctattgacacacgcggtaaaagaatcactgtcaccgacaaaaaggcggggacagaatacacggaaacttacgataatctggtcattgctaccggttccgttccgtttaaacctccaattccaggcatagacggagagaacctgttcacagtgtggactattgcggatacagatttaataaaatcctttgtgggacagagacagccaaaatcagcggcagtaatcggagggggatttattggacttgaaatggctgagaatcttcgggcggcaggtcttaaggtaagtctcatcgaaagggaaaatcaggttatgccccatttgactatgagatggcagagctgctgcatgagaatatgagagcgaaccaagtcgaccttattttaggagatacggtaaatgcctttcattctcaaaacggccggacaactatccatctggacagcggaagatccctgactgctgatatggtgatattatccctgggcgtgaggccgaacagccgcatagcccgtgatgccggtattgcattaaataaagccggcggcatcatagtagacgaatttctgaaaacctctgccgaagatgtatatgccgtgggtgacgtaatcgaggtaaccgagtacattacaggtaaaactgcaatgatacctcttgccggaccggccaataaacaggccagaatctgtgccgataacatcgctggcgataaaacagcctatcatggcgccatgggaacctctgtggcaaaaatatttgatttaactgcagcctccacaggtttaaacgaaaaatccctgataagcgcaggattggttaagggaatagattatgagacagttttagtcaaccaaaagtcacatgccggttactacccaggttccgtgccgattacacttaagcttatttttaataaaaacggcggcatactgggtgcccagatatcaggacaggacggtgtcgataaaagaatagacacgattgcctccgtcattcatatgaagggaactatctatgatctggaggagcttgaactggcttatgccccgccattttcatctgcaaaggatccggtcaatatgcttggatttgttgcagaaaacgtgataaaccatctggtctcctttatctgtgtccatgaattggaccggctcagccgaatcaacccggacaagccagacggagagtcctatactgtattggacgttagggagataccggaacggctggaatccgcaattccaggctccatacatatacctctggggaactgcggctccgcctggatgaactggttcgcgatgagctgattatagtgtattgtgccatcggagtacgcgcatacaatgcagccagaatcctgatgcaatgcggcttcaaacatgtgaaggtattatcgggaggcatcacgttttacaactccatgcatcaccggaagctataaaatataaccgtctaatttaacttgggggagtaacctgaaattatatattcaggttactccctcgtccctgtctattctgtccggccttttatatgattagacagataaactcctgtcaggattgccatggacccaatcccctgcaatgcggtaaaagactccccgagaaacacgatccccgccgcaatggagaccatggtcaccagattagtaaagatactggcctgcgccagattcaaataggaaaatgcatagttcaggaggaaaaatgctcctactgaagaaaatgccgccagataaaaaatactcccccagacgcccggccccgacagcggctgcaggagccggcccaatgcgccaccagattgtatcactgaaaaacaggtaaaaaacaggctgcccagcccaatcatcacataggtccgctcaaacgacgtgaagctgtccgccgtatccctcatcagaagattatatcccacacttgatactacggcgcaaaacagaaatgccacgcctcctgcctcattgcttcctctctgctgagccagacttatcaccgcaactccaatcacggaaagcaccgcccaaagacctgcagccttgatggaatttcttttctgaagagaactcccgcaatcagcgtgatcaccggcacaatggctagcagtgttcccgcaaatgccgtagacgtcccccgaatcccataattttcaaatgtaaaataaagaaccggctgcaccagcccaagcatgaggattttttgaaccggctttcccgtcagcctgatcttcacctttccggtcagcaaaacaagattaagcatcacaaatgccactataaaccgtaccgccagcaatacaaacggctccagccgttccagcgccactttggaaaataaaaagcttaatccaaaaaatgaatttcccagcacagccgcagcaaccgctttcatcatcctgatatccttcttcatcaccttcaccctttctcctgtattcctatgtaatgtcgttacgaaagacttccacattatacaggcatccgggataaacatccatttatccacaataacacgttaaaagatttactttttcctcattcagaccttaaatattaaagccgttgtgtaaaaacataaggttactgttcctccccgccaaaagggagcgccaaaaaccacccgagtaaaacggtgttcattgtatttaaagcatgattttgttataatggagttaaattctaaaatcagataaagaggtgacagaaatcgatcagaccgaccacaagataatacagctattacgtgaaaatgcacggatgtctttttcagaaatcgggaacaggacgtccctttctaccccggccgtaagcaaccgggttcaaaagcttcaggagcagggagtcatcaaaggatacaccgctgttctggatgctcaggccataaacaggcagattatctgttactgccagatttttttacagagcaaacaaaaatcatccactcaggtattcctggacatgattcaggaagaacctgatatatgggaagcttattgcatcagcggcgactacgaatatttactgaagattgtaacatcctccacccaaagcctggaatccatattagcaaaaatccgttccggaataccggcaatcaaaacaaaatcttccattgttttgtcctccctgaaagagactccctccgtcttggattttaactgagacagaatttgactaaaatgcaatttgaacgcgattctcctgttaaacgataacctgcacgcacaggtcaccgtcatcagcaaaaaaagcggaaagccctgtaattacaaggttttccgctatctttcattcatgaggcatcggggattcgaaccccggacaacttgattaaaagtcatggttcctttccttataaaataagggcggaacgggcgtacttggacaaaacttagacattctgaaatattttaaaatgcggatcactcctggtcacctctgttatccatttataagtccgctcataaaagccttcaccaattcccttttctgggcagacatagcgtcaaacatacacaaaatgtcttcttgttcttctgtcaaatcagggtgctttttagaattaaaaaactgggccattgtgattccaaaggcatcacaaatctttgccactgtgataaatgtcggttgattagtccgactgaacatatttgatatggtagattgtgatatgcctgatctctttgccagtacataatgcgaccagccctctttatcgcataattcttcaattctctccagcacataaccttcatccatcatttttacttcccaactctgtaatattttatactaccattgtaacctatccaaaaatctaaaatagattttatatcatatagtatttactttataattacgttataatactactacaaagaattaccatataattccagcaccatcactgtaccaaagtagtatgataaagttaaaggggagggggattgacatgaaaaaatggaaccgatttaagcttgatatcctatattacctgtctgctatcgaccttgcgttaactggctttgcatttactgtcaggtatgttgtaaagcatcgaaggtttcccgagaaaacgcaaaaatacagcagggaggaaatactggaagagcttaagaaaattgctaaagagcaaaaagaaaaagaggccccggttgagggtccggggcctagagagtaggatatgtggggcgaggccaatggagagcatgtctcccagcgtcgcccatttttaatgatagcgtaggcttgtttttgcccctatacccaataaacggataagggtatagttttgtgaccactacccagccagcatcttcgttgcgttggtctgtacaaaagcttttatctggtcatatccccatccgcagcttatcaggctactgaccagcatctccatagattcaatctgcttaagttcatctgctgtcacatattccctaatgctttccttgcccttgacaccgtactgtgtctgtagttctttcatggttttaccgaagatagtcttgtaaataagctttgtataattgggataggcgaatttcttatgcgggctgtcggctactttcattttgatggtgtcagtcaggatatgacggacgataacacctttatctctctcgatttgccactgctgccgttccgtgtaaattcttttaagttcggtctccatagtgttgaaagctttaatataatccagtttccacctcaacgccttttcacctgtaaaacccattgcaagcagagaaaagccatccctgttcatattatacattctgtattcatgattattcccagccttatatgtagataaggtaaacatttctgcgactgtcgaattttcgaccgtcagtttatcgatggcctcgagtatgtgttgatggttcttctcgaacttttctgcaaccttcaaactcgttgtaatcaatttttcttcgtatctcttccctgtgatttctactaacataaaattcatcctttctctgattttattttgccgttacattactcttttctttattcttcttctcccaccacacaaaaaagtggccaggatacccccaaccactcaaaatattttaattaatttcccacacctccaggccgccaaaccctccggcccgctcgtgccagcatgcgccctccaacggcccatccaccgtattgtcgagaaaataccagtcccccggttcatccaaaccgatgacgctactaccgttccagcgctgccagccggtcagcatgtatccgtctttcccgaacagataccaatgatggttaatcagcagccatttattaactgcataggtgccgtctgcctgtacatagcggtatctgcccaaagtatctttctcccaccccggtgtgaaaccggctgatttaagcgcggctttaaactcctcccaggtatgatccgtatgattatagacaaaaggattcgggcatattttaccggtgacatcataatgccggaccacccggtctgccgttatcttgtatttttccatcagctctctggtcagggccacagccgaacgcaccgtggcatcctcaaagtaccaatcccggctggttgccgcctgacttcctttgtttctgacacacagctcaattccgatactgttggaattgcggcactcgggatgcttatatatgccatccttacggccgctgtgccaggctatatttttatcttccacgctttgccagatgctaccatcaaaatcaacatagtagtgggcgctggcgccaatatgctcactggcatagtatctacagttggcctctgccccgccggtggcgccgacatagtggattacgatgtacttgatacggctaatctgaccgtcgttataattgtatggggtaagcagtttattaatcttcatcgtccactccctcctgaccataaaatcccatcgtatccgggtctatggccgcccggaagtcctccagattctctgccggtgccgctgccacttcggtctgcagctgtttaaaccacttttctccaagttctctgctctgttcactctgtaccattataacctcctattaaaaaaggcccggggatatcccaggccctatgtactgttgcgatatcgcaacttatactgtctcttccaccggcgcctctgtctgcttttgctgattgtctttaagctgcttgtacatctgattaataccggtagccgcgaggccagataccgcaccgacggccgccgcattgataatgtctttcaccggataatctggcatcgtatacatgcctacaacgcccagtgtggccccaataacgccgcaaataactggcagccacttgttgtctaccgatgtcgctttgacggccatagcggccaaataacacagcgctgtaattcctgctacacatgcaattccaaaatccataattattcctctcattcatgtgcctgctggttgatgtgtttctctattttattgatagcttctgttacggggccattgcacccctgttctttcaatccctttaagcaagccagtaccccataggtaagcaggcactgttctgattttatttgctcgatttctttgtcttgtctttcctgtttcagaaaccacctatgggctgcaaaaatggccgaaaaaatggcagccaatgctgtcattgcgctggctaccgttataattgtatttgtgtcaatatacatggtcacctcagtgacaggacagtctcaaagggccgccctgtccatttaaatgtcgcaactattctgctgctggtccagtcgctgcgggtgtttccggatgttttaacggcagcttgctttttgccagcagctccgggtcagctcccggccctttcgccggcggggtctgcggatggtcatagccgccgctgccctttgcaatcaagtccgggtctcctgccgggccattaataccaacgttacaggtacagtccgtatccggtgttaagtgtttgtagtggttggcgtcgttgattttgtgtttcttgcagttactcataattttaatctccttttcatggcttaaattataaaataagggagagccaatcggctccccaggttacttattattctgttttattgattatctggctgaaaacctggtgcaggccggtactggcaagtcctgttacggccccgtacacgatactttccagactgaccgttccgacggccacacatcccaggattgctcccagaatcgccaggatggatggaatgtattcgttgctgaccgcatccaaccacttaatgtgcttaatgcagtagccgaccaccaggcaggccactaaaacaactggtatgtaatgctgtgtaataaatgttaaatccatttgattcctctctttcttagtgaaatatcccctgctgaaccgcataaaaaaagaaactgaccaaggcggtacctaccatgccaatcaggccatagatacttcttgtctgtttctccaatttttcacagagattgtcaatttttacgtccctggctgccccatgcagctccagtttgtccagtcgatccgcatggttattaatgcgtatttcgtgtgtgttgattttgtcggtgattaattcttcattcacataggatacctctctttcttgattataattcaccttaccgccagcaaacgctctccgtaaaggctattcctacaccttgtacgggaagacagttactggtacgtttgaaggatatgtatcctctccattatacttttttaataatggtacatggtccaatctccaaactactgggatgacaagtaccacactagattccagcaacttaatattgagtgcttaccagatgggaagactaaatcaaacggttgacttaacaagttataaatacttaaaagtaaaaggcaggtgtggtagtaccccggtgaacggatacaagttttcaataggagcgtctaagtctgcatctgcaaaggaaacagatatggcaaaacttaatgtacttgatacactatcaaacgggccagagtataatatacttgacatatcatccttaagtggtaattattacatatatgtgtatggtgtctactacagaagttctagtggaaatttaggccccgatagggggtttatctacgagatatttatgactttagcttaaatgccagtaactcgttacttacgaattagatagggatatagttccacccattattccattatttttggtagtgcttgcgcttcttacagacacataaataaaatacatcccattgtaatttgtgacatccagaattacgttaaaattagtaacagtactattagcaagcacctccgccccatatgtaaccccgcttccatctgcttgtaaagatatccctactttagtgtagtattgtgagcctgacttatcatatgctctggggacgaatagttttaagtatttatatgacgaaacatttactgctgtattaagtcggcccaacgtggaaccaccattactaccacaaaacacgtttatgctttttggacttgtaatccatgaaaagaaaccagtcgaggtgcctattttggttgctcctgtttcgttcccggtaacatcagcaggagaagataaccattgttccaacgtaccagtaactgtcttcccgtacaaggtgtaggaatagcctttacggagagcgtttgctggcggtaaggcgaaggctggaatggtgtaattgcttgtcatgtatttgccagaacagtttgcagttactgctgacgtggagggtgtcaatgttcctcccgcctggctgggaatcgtcccagtgattttactaccgtttacccatgccgttcttccggcaagaatatgcccggccgctgatgtaccgggcgtctggctggccaggctttttgctgtcacttttccaccaccgccgtgttttccaccaggaactgtcactgcagagccggccaccagttctgaaaagttccagttaccttggtccgccatcgtcccggtcagcggctccccgtttttgtccacgattactttaccggccagaacatcctctgcgccggctgttattacatccaggtcgacaccgcctccgccgcccggcatcaatattttccccatgcgttacacccccttcaatcccacaaggcaatctgttgccggcttcttgtatactttaaatgtagccgtcccatttcccagcgatgcagttccgctggagataatcccaaatgcctttatatacgccttctgggtggtgacgctcgccccatcagccagcgcactaaccagtatcgcatccaggtcggccgtagctcctggcacacttaccgtctgggtgtacggagcagcaccaccctcccacccagatgccgttaatgttacttcggtcacatggttaatccgattgatagcagtattggtggaattaatatcattagccccaaaccgatcgccttcctgtgtataacttgtctcatctgcaattccggatgtcccgtctgaattctgggtaatgcgccacttccgtgccccatcgtacatcgcatccttatagtctgtttttaaaatcattttaaaaagcacctccatttaacgtaaaggccagcttcttccgaccgttaatcctgctctgaatattgttgtgtataaagcggcatgcctcctcaatccggttcaactcccgccagtcgataaatggctggttgtcataataagtctgctgttcgcctatcgcgaatgggaaagtgcctgtgcggatatggtcaagattggcctcaaaccggtttatctcatccgcataaaacccataatcctggtacgtcttatcctcccccatctcttcgaacggaaaattcggccagaggacaagtgcctgcgacctgatttcaattagatttccctttatgcgattgtaatcttgtatgttaaaaaaatcattttcccgccaatctgtttttggctgttgccacattgctcatatccctccttgccttcatgctccctgacagggcgccgttaaaattaagtgtgtggtcgtaaatcctcaggagcaaatccgggacataccgattctctaaaaatgcaatatcgtttgcatctatcctcggttctccgcgataagtcagcgcatattcccgatccgctttcatgtaatcgccgatccagtccgccaaatcagcagcatgcctcgtgtctgacacaagggggttcttccacgtctccagcgtccccgtcgggttcagctgacggctgaccttggcctgcgacgttccgtattccctgccgtttatggtcacctcaactgccccggccgcaccggtcacttccacggtggcgtaataattgcttgcttccacaatcgccgctgcctgcccggcctgcggttctgtgatggcgcaggacaggtcataagacgggttcgagaaatagaaggtgtatcggttgtctatcgcggataacgtaatggtttccttcgccagctccttcgattctccgcccggattgtacagtgtccgcagcacctgcagctcccgtgtcttggcaacctgggttcccttcggcgtcttagtcagctcatggccatattccagcacataatctgtgctgtcgccaaaagaaatatgattcagcacaaccctgttatccgggcagcctctggtaaattccaggaccagcctgtcaaactctgtaaattcatgactaataaccgctaacgcctccaatacggttacactgtagctttcctgaagctcgtcattataataggcatggaacgtcatcgcctccggatggttccggccaaatcccatcgtcaggccgaagcatttaaacgcagcctccaaaacaatggtaatggttggattctccgaaaacagtccattctcatcagctgtttcctccgatatataaccggtatccaagtaagcagttccctcagcctgccggggcagaaaatattgtgtcggccttgcgtccgaatagttccggacgggcatcgcgtagtccgccttatctgctccatttaaaacggcgccggcatgtgaaaaataggtttcattgtctgagttggcaaccatatccggaataaagctggacttcaggaaaatgtccccgttcctatcctgatacagaatgcagcggcccgcattagcaataatctgcagtgcttctttgtgtgtaacaaccggcataggattctttaccagtacatccttcaggtatgggtctagccagtacgtccggtgatccacgccggcgtcgtcaaacacatctgtggccaaatcatacaggctgataccagactcccggtacagccccttatgatatgtcgcgttcattccgtcaaaacggtcggacgcagaaaaactcatttcttcatcatccgcagaccattcttttagggacacagtagcacctggcaaccactccactgtcccgtcatccaactcctggccatacagcaccgatatctcctgccccggttccaggaaattcaccgtactttcgctgttctctacatcataggcacggtctttattttccaccgtcaggttaaaatcaatcgtcggcaattcctctgatataggactgatatgttccttcttgctggctgacctgatttttttattatcaaagtaaatgccgatccccattgtcagctgatgaatgcggaaccggctccggccatttaccatgactgatggcgtaaaacgcaaaaacgtggctgcgttaaaaatttcttccgtcacaaaatgtccgtcagcattcccaattatctccactgtgttattatctgattcaatcgtaaaatccactggatacgccttgccaaaatctatcgtcagccccttgatatcgtactgtatcggaaaacgaatcaggatactccccgtcagttcttctgttacaatccctgcatttaacactacatcctgccggtgccggggcagaaaatacatgctgccattcaccgtgctgtaatcttcgtcgcaggtggcgtatagttccgataccgaataattatccaaaggccattttaaattactgtagtaggtgtaattggtcggttccggaataaaagcggaggcctgggcctcctggttaattaaaccaattgttacgcgcatataggagtggttgcgatattcctttttcatttccgctttataggcttggctgcacgcctgcattactccatcaccccacaatccacaatgttcaccttgcagtctcggtacctcgtcgggaggccatcggaatcaaactctatcggcgtagctgtccgatttccgggatacatccgaatcgtcatccaaccattatgtaccatatccggtatccttgctgtcaccacaaatttgtcaaactcccgcaacatagcggaccaggtggcggcgtccagaaacttccattgcagggcgtcaaacttatactggtcccggcctactttttggccaataaattcccctaaagcatttttaccgtcgctgacgttcgtggccactaccaggttcccgccaatatcggggcgggaaactctcggccattgattgtaattactgccatctcaccgcctccttacgtaaatccataacctgtgcgcttctctaagtcctttagtttcttccggatttcccggatgtcgatgttgaccaccaaatccagattttctatcagctcgataatctttcgcaacagttctaccataatagccaaatgctgctcacttgcgttgtctgttccgaatgtcattgcgacagctcgattgaccatctcctccattctatcctcttgtgtatatgccggtgccgtgctaccgaccattgcaagcggcggagctgcatgattggccgcatttgccattgtggataccaacggtgcaattgcactccgcatgccactttgtaccgcctgggtaatgccctgtgtgatttgcatgttgtttgccacggctgcgcggcctccccaactgccgaccatctcggggataccgtcctcccgcgccacaaacatctgccctgatttggggaagcctccgctcgctcgtccggtaatctcactggcggggccagtggaagaaccgcggctgccgccaccctttttagaaccgctgccactgtcactatctctgtcttctgcttctttggactttttaaaaatgtcttttacggtgtcgcaaacgtcttgccagatacgttttatttcatcgacaataccagataaccaacctgcaatttcttcccagactgcttttaagccttcccagagtttattcattacacctttgccaatctcgtacatctcatccagcttgaagacgtccttgattttcttccagatgtcctcaaaccactctttaatagcgttccatttgtcttctattgtggaacggacattgtcccagatttcggaaagcttatctcgtaaagcctcaaatatctttgctgctttgtctttaatactgctccaggcatcgcttgtgtatgctttgattccattccagacatcctcaaccttgattttaatagcgttccagatttcagcaagtttgttttttaataccgcaaagaggttagatgcgagtatattaattgaagaccagatgacattaccaaaggctttgattgcattccagcgtgcctcccatgtctcttttatttctgtaagtgttgtatcccaaatatttttaaggaacgctgtgatatcatcccataagtccttccacgtataatcaaaattgcctaaaaggaaatctaaaattgatgtgaagaattttatgacatcagtcacaaatcccgaaacaactcccactacccattccaaaatgtcaacaatcacgttaaaggccaaggtaatatatggagccaaagttgatatgaaccactccgcaaacggtttcagatgactctcccaaactccaatcagcttttcaactattatccgtactaattcagctactttgccaatgagggtgctaaaagcatcagctatttctgcaaatgggccttttcgtaggtttcgaaaagcgtctccgatgtgctgtaaagccggtaataaccacttattgaaaactgacaggataatgctaatggcctctgatataacagatgcaataaacccaaatactggttgtataacaccggaatataaatcatttattacttgccctacatatgtaaatgcgtctgctattaagctcgtgataggtgaaacagcggctccaagccctgttaatgcttcgattattttatctttgttatctatgataggctgtgtaaataagttcagaatatcttcggatatactcccaaacaattctaatagatttaacgcagtgtttgaaaatacctctataatatcagcgccaatctgcttaaagtcttcaagccgcaatacagctattaacgcactaagcgctttaaaggtattaccaaaaatagttgcaagttcagaaccaatatcaaagcaacttatcagtttcctttttataaattcacggtttttattcagatatttattaattgaaccaactaatacatcagctatcgtagcccccacagaggcaaaacttccagctattttccctaaattataggataattgattaacgaaattgtcggctgccttcagaactgccggatccgtaaaaatatccttcaggcttttcttaattccatcaatcgaagactggatgctatccaggactgatgtgtcgccaaagccaattttaaacccatatttaaaaaggtcggccagctccttcaccttatcaatcaacgcttgatacttggcatccatctcgtcgactggagaggtatcaatctctcccatgtcaaattcatctgcgtcgtagcccccaccggcccctccaccgcctcctgaaccagaatctgatggctgaataatattcagttcatcaatgcctgttgtcgcacctttgatgtcctttgctgctttcttggcagctccaccggctccgcccatcgcagcgccgacattatctgccgacttcgccacggcctccatgccggctgcggccactgacactccgcctccggaacccttttttccggatatcaggttcgtaaaggccttaaaagcattggccagagacatcagcttgccgataatcgtattgattaccttgatgaccggcgtaaggacattgataagcccctggccgatggtggccttcaggctgtcaaattgcagtttcagtattcggacctggttggcccacccatcagcggttcgaacaaagtccccggatgccagggtaagctgctcttgcacgaactgataccgcagggccaccttctcagcttcggacattttggcagttactttcccgtatccattggccagggcatagctgtcaagggcactctgcgtcataacaatgcccaggtccttaagcgtctctgtctcaccggtaaagacggactttagctttgtataggcctcgtcctgcgatatgttgtaaaacgacgccacgtcaccagccaggccggtcagtgccgtggacatctcataagcctgcttttcaccaaagccgaatgccttcgccatcgctccgaaggttccggcaaatttcttcgccatcgtctctgacagaccaaattgcaccgccgcattctttgcgaagtcatcaatctgcttcgacatccgcgggaatgtaacgtccaccacgttctggacttccgccaggtcggaacccagttcaatacattgagccccgaagtctaccagcttttttactgcgaaggcagccgccagggccgcaccagctttcttggccagcccctggatacccttcatctgcttgtcaaaatcgtttttgtttactacaaggtcaagaccaatctgaccaacactgtcagctgccatttacatcacctgcctttatctcaaccacctccgcacattgccgccatcatactctcgagataatccatctgctgctcgtaaatatacggctcctgtctggtgcgttccgccgcccggttccgccagtcgtcataaatccgcttctgttcccgggtgaaatgcttaattacatctttgtccgtttccgaccggatggccaccatgcgccccaaggcggtttccggtgcaagaccggctagaagggatttaaattcatcccagctgaccgattcgaactctttcgttctgatgcgcaacccgtactgtgataagaaactggatataatcaagtcccagtctccgaataaatcatagtacgggtcactgctctcccggctgttcatcctcctctataatcagtccaactgcctcctgaacgacgacaatcaagtcattaaatcccagcttcagtttctcgatttctttcttggatttttcggggaacatcaaatcatatgtttccaggatttcatttactcccggctctgcgcctcccatcagtcccatgactttcagcattgttggggcgtctgcatttacctccaagtgttttcccctaatcaccagcgatgggtttccttcaaatgtcagtttctctgtaatatcaattatcttggccatgttcttcctcctctacaaaaccattaaattcgttctcatatattaactctgagttttcctctcttcattcagatggctttgacgccggcgtgaacacaggctttccataacaggttacttcgaattccagtgcatccagtgctgtgctgtctccacctccgggtgtcgttacgtttacaacgcagtcaaatttcatctttgcaccggataccatttcccactcaaatttcgtcattgcatcttcacccatacaaagcgcaagacccgcaatataatcgttgcccggatcgcccgcgcttcgtttaccctggaaggaaaaactgagttttttccctgtcactgcggacttcgcccatccttccgcgtccatcgcgtaccactcttccgttgttccatcaatggtaggggcaaagttggtcaaatctttaggcactaccatttccgcgtctgtactaatgtaatcctgtgagcaaaatgtaactagttccttagtcttttggggatttgagaatccttaaagacccttaaaaggctttaaaaatccgaaaatacccttattttaggcggttttcgccttaaaagtatttaaaatggcataattactaactaaggaaccaaaacgtaactgaatgacatttttgcactgactaaggaactgaatagaaaatgtttaaaaagcccgaaaaacacgtttaaatcaatgtttaacggacttttttagtatgattttataggaaatggactaagggaaaataaaggcacttaatattgtataaatatacacaaaagtgcataattatgcaatgctaggaaatctaatgacaaccttttaaataaacgttacaaggtcagatcttttccgtattgtacgaggtagcaagataatgccttttttatattttcatctattctgctgattccggtatcgatcttggttttgtgctgtaaaagtgctttgtaattactatcagatacagtcttcagcatataggagttataagcaatctgttctagagcactatttatactgcaaagtgcttctaaataattctcttgattttcgtcagtcaatccaggcatagtggcaaggctgacaaaatgcgaataggcttgaacgatattttttaagttatccccggtctgttctgcgatctgtttttcaagtatgtctttcatgatctgatatttagatcgtaaaccttcatcagttacaatatcaaatccattatattttgaaaaaatctcacctttttcttctgtaagccattcttcacttactccaaattttacacataccagttttactaatgaaagtgacggattatccctctcattctctatatttgataagtgtgcttgagagatgccaagttcttctgcatattgcttttgcgtttgttttaatattttccgtacctctttaaatctgctattaagggacatctttatacctccaaatacataaatccaatataatcatattgacaatattggaaaccaatattataatacaaataaccataataaatataacaaaaaaatcaagaatattcaacggctaaggaggtggagaaatgccgagaccaacaaacatggaaacaaagacacgcttcggaatgcttatctgtaaccgccttacaaaaatgggtaaacatcaaaaagaccttgctcaagaatctggtctctcaccgttctatgtgagtgagattcttaacggtagacacaacccatctgtaagagcagtttacaacatttcgagagtgaccggaatcagcattgaagaacttatcaaagccttacttaatgaaagttaggcggtgagaactttgacatggctgaaaattaaagatgtagctattctgatgggaatgacagaacgcggtgttagaaaatcagctacacaattgaataaatacgagtaccgccatgttaaaggaaaagggaggggcggtactcaaattgagatcgccctggagtcattgccacaggaagcgcaagacaaatacaacaacgtacaaaaggaacaagctcataatgacatgatgcagttcacggggaaacagcgagaggaagccaactttaaggcgttaattgtagaaaactaccagaagtcgcaacagtcccctgatgattacattaaagattttaatgaacggaatccagacagcatgattacaaagtcccaactcttccgctggcaacgcaagtataaaaacggggatattgctgtattgattgacatgcgcggcggacataacaggggaaagacggatattccacaggatgcatgggaatttttctatagcctgtatatgaccttacaaaaacgcagtatcgaaatttgctgggaatatacaaaaacggaatatccggagattccttccgtatctgcctttgaacggaaagtcaaaacaattccggaacccgtgatcatcttttacagggaaggcgaaaaagcgttcaatgattcccttgtatgtatggaacgaagcaaggaagacatccactccaatgacatctggttttctgaccaccatttaatggatgtagcagttttaaacaatcgcggccgggtgttccgcccatggctcactgctttctttgatgcacgttccaacaaggttattgctttcattatccgggataaatccgcagacgcaaccgtgataaagcagtgcctccggaaaggaatggaagaatttggagttcctaaagaactttatttcgataacggaaaagattaccgcgagaaatcattcaataaagatttccctctttcccttaccaaacagttgggaatcaatcagatttacgcgacaccataccatggacaggcaaagccgatagagcggttctgggaaaccctggaagatcgtttctgtaagttcttccccacctatctgggaaaagacgcgaagaaacggccggaggatatgcgggtaacctttgagaaactgaaagataaatgccctaccatggagcagttcacagatctgcttgggaaacacatgaacaagtacaataatacaccatctggcggaatcgacatggacggaaaatgtccggatcaggtatattttgaaaacctggccgtaaagaatgaagtccatgacaagtcaatcctgcggatcctctgcggaacctttgacgaaagaaccgtacagaaaaacggtgtacagtaccagggaaggttttactaccatacggatcttatcgcccaccagggagagaaagttatcatcaattatgacccatccaacatggatgaattaaatatttttgatgaaaacatgcgtgcaatctgcaaggcagccgcaaaggtaagaaccccgttccgtcacactacccaggaacagatccgggaagcaatgaaagagaaaaagaacgccagaaagctggttgaacagtatgcaccgaccagggatctggacgttatggcaatcgttgcccgcaaccagcttgtagaaaagcagttcacagaaggcgaacacacaaagaccattgagaacattaaccctgttctttcagaaaacagcaagatcctggaggaatcaacaaagcagagacgcacgagccgcgaggagaaccttttaggaaaacttatggaagcaagcaaccagtaaggaggaacacatggaaaagaaagaatttcgggaagaattttcccagtttatgaagcagacagggaagtcacagaaacaggtcagcaaagagaccgggctttctacttctgtcatctcccagttcctggatgggaaatacaccggggataacgggaaggtacaggacattttaaacaagtttttaagcatcagtaaagaccgtttaaacagcgtttcaggaacaacgtactatcctgatctttacaacacaaaagaagttttatatgcctgctggtatgcccataaatataacgatattgcccttgttgcaggggatgccggagccgggaaaaccaccgcgctggaacactacagggacagcaacgcaggcgtgaccatggtaacagtaaatacctgcaccacatccgcaacgtctgtattaaagctgatcgcggataagatcggacaggcaacagacggaaggcgcagcgcggtaatgcaggaacttatctctcagctttccggaagcaaccgtctgatcatcattgatgaggccgaccgcttgtctttacaggctttacaggcaatccgggacttaaacgaccaggcacatgtggggatcattctttctggcaatgataagatctataagcaaatgcttacaggccagaaaggccgggaatttgaccagatccggacgcggatcattgtcaggaagcgtgtagaaaacaactataccgttgaggagatgcagcatatttttccaggagtgccggaaagctgccttgcctttctgatccagatggcaaatcttgaaagtctgcgtacagcgatcaagctttatgagattgccttggaatatgcccgtatcagtaaggaagccgtcacattaaagatgctgaaagatacacagaagcagctctttgggaggatgtactgatgaagggcaaaaaagaaatagccagccctgcaagactgactattccatccggcataagccggaacacaagtgttcacagatagtatagcagaccgttcccggtgttgcaatcattttttgcagccgttcccaaaccatgagacgcagatgggcgcaggaatccattttcagcgatatataaagacttccttatcacgaatgctttaaacggttttaaaagggatatgaacggttttaaaagggatataaagccaaaggaggatatgaacatgaagaaaaatacagaaactgctaagatccccatgattaaccaggtgctgaaagatgccgcgcttggacatctggcagaatgcgggcttccccagagtctgatctctggcgtggactgctccagctatgagcggatggaggagacgctgctggaagtgaagaactgcttctattcttccgtaagaaagaatatcgaagacacttacggcccatcctgccgggtctatactccggatgacgagtataagcatttgatggaatataaagaacgggattactggaaaatgttcgacaacatggactgccacacagaaagcaacaagtatattgcaaacctttactgcatcatcggagaccatgtaaagctgggtgaatttggaaaagagaacgcgaagctctttgaaaaggagcggcttttagagaagatcctggaaacaggcgtagatgaggagctgctggaaaaattaaaagcctactgggaactgcagggagagatccgcggcgaagttgaacgtgaagggtttatttgtggattccgcaccgcttaccacctcttaaatgaatgcaggtcataaagcggcgcgaaaagtaaggggaactgttttgtctgtcaaagcggttccccattgttatattatccagaatggagggatggatagatgggcgcttctattagggaatcacagatccgccttttaacaccggatcagaaggaaatagcggaatgcattgggtttgaagcatacagcaagctggccgcctactatggcggaagccgtgtttatgttgcaaaactggcatcattggagcttgcggaacgtgacagccggatcatcagagattacaaagccgggaaaacgtcaacggcagaacttgcggcaaggtacggcgtaagccccaggcgtatccgggaaatcatcaaaaagcagcagtaaaacaaggatgtggaggaactacacaatgggaaaaacaccggaggaattattaaatgaacttagtgaagcggatgcagcccttttgggtgaagactgccaggcactgatccgagccatcgggctggaaggtttcaaaaagctgatacaggaattttctggagtacagctgtatatccccaaacaggaaaaagtatgccgctatctcagggataagaagatccgccaggagtttgacggaagcaaccacaagacactggcgaaaaagtatggtgttacagaagcctggtgccgcaagatcattgcaagcgagttttagagccatgagcctgtttttaatgattcagcagtacgaaaacgaattagccaggatccggggacagatcagaagcatggaacaaaccggagaagcggacacagatcggagaaagtaccgtcagttaaagcagatccgttcagaattacagtccagtatccgccaaatgaagcagtatacaaagaaaggatgatgagcatgggatttattgatcagatcatgggagccatgggcatggaagcagcccagacagtaacagaggaacctacgagcaacgcggatccgcaacgcacagaggaaaccaagacagatgaggtaaaagaaaaagctgaaaaaatacagggtttggatgatggaaccgatcagggtgaaggagcttccagcgaggagaaaacttattcccgggatgagttaaacgacattctggacgaaaagagaaaagaatgggaagaggaacgcctcgccaatctctcgaaggatgaacagatcagccagttgaaaaaggaacttttcaaggcaaatatgaaagaccagatcaataaccgcctgacggaggaaggcatccccgtaaaggctgcggagctgatccagtatacagatgaagccggtacacttaaaagcctggaaacggtcatttccaccattaaggaactggtatccgatggaattacggaaagacttcgtggaaagaccccggaagggcttggaaaatcagcttctaccgggttctggggaaaaccggaaaaagattttgaaactgcatttgtcaaagcaatgaaaaactaacagggaggtaaaacgatggcagtaaactacgcagagaaattttctcagacaatcgacgaacagttaagtaaggattctcttacagataaagcggtcaacaaagattatgattttgatggagtaaacaaggtcaatgtctattctgttgaaacagtgcctttaaatgattatgatatcaatgcaaaaagcaaccgatacggaaccccggtggagcttgggaatgatgtgcagacactggaactgacacaggacaagtctttcactttcagcattgaccgtaaaaacgcaacagacaccatgatggcaatgagcgcagccaaagcactggcgcgggaattaaaaggggtggtaactcctacgatcgaccgctacaggatcgcgaaatacacggccgaagcgttagcagcacataccaaagaggagacacttaccacagaaacagcatacagtgcatttctggaaggctccatggtgctgtttgatgctaaagtgcccactgaaggccgtatcgcttttgtaacgtccgcctactacaaagcaatcaagttagacaagaatttcgtatcctccggggataaaggccaggaaattgccgttactggggctgtgggaactattgataagactacgatcattgtagccccggcagattactttgtaaaaggtacaaactttataatctgccatccaatggctatgacttccccggtaaagcttgcggattacaagatccacgagaatccacagggaattaacggctggcttgtagagggcagaatttactatgatgcttttgtgctgaataataaaaaagcagctatttacctgtcaaagcaagcagcaaaatagccgttaaatatggattaaacacgatttaaaccgcctttcaaattcgtttgagggcggtttaaatcttttaaaaagtaaatcttttttcgtgccaaatgcaaaaaaatgtataaaactttgcataaaaaacagggctctgtaacggttcagttacgttttgcgcgaagctcagttacgttttgcgcgccgcgcgacaactaagcagaccggccgtaccaaatttaaatttgttattatgtaccggatatactgttccgttcatttatttcctcactttctctgataaataaaatccagccatatcacatattcatatacaccgctgtcatctgtcccaacatcctgcggttccgggaccatcaggcgcaggtaattgatgtgggtgtctcctatagatagactggttacacttcttagtttctcaaataatttgtaggcttccacctctgactcactcttactcttgttccaatgcacaagcagggaaactggctttatatcataggtggtgcagtctacccctcccaaagcaatattcggcatcccactggttgggcggctgtacacgccgatggatttctgttttttattgtccatcttgccgatgtacacattatcatccgccgctatcccaagacctgcaatatagccgcggatatcattgattgtaagcatcacacacctccaatccgcttatacaaacgcttgtatgccttcttgcaaaaatcttcgctgattccaccgggcagccacggttcataccattcaccaccagcaaatggattctcgtctgtctggaaattgtactccggatggtaatagagacggcgcgcataaggcgtacttaccaccagcgtcacctttccttggcctgactccttataatccgcaaaaaaactgtcttcctccaggtgtccagtatcaaaaggcatcacctgcgcctgcactacttctgtatgtagcgcctccgcagtcatctccagagccgtcactgccgcctgtgtcagctgtttaatccgtgggatgttcatcttcaccgttgattttacctgcatcagaccacctccaactgacaataattaaccgtaccgtctgggttccgggccttcatcccttgctcgatgcggcgttcctgaccgaagactgtcactgtcccacagctcaatgccggcatctccggtgcgatgtcccccggaaagagcgcagtacctgtaatctgcaccagcttcttctctgccgtcaggatcgtcttcgcccggtcctgaaagttgcattttaattccagatccgccgtatacttcgggctgccctggttgttcagttcttctgattccagatgaacgtggatatccgtcttacaaaggcgtttcggcactaaacatgggtatttcatctctcacctcgctaaccggcagcacaggcctgtctgtgacagcagggcgtacacatcgcgacgcattgccacacctttatctgtaaatacgttccaggagcttccaaattgtgccgacaccccgttgatactgtagccctgcaggatggtgttaatctcatccgcattctcagtctcaaagtccgcctgctggcagaccacttcccggattacttcttgctggaagtccgtcagattggaaaatccccggcctacaaccctgttacaggtcagggaatcaatgtggcggctggcctgctgcagggccctttccaggccatctgccggcaccgtgctgcctttataggtatctcggtaatactccggtgttgcataaggttcatagggcatattattcccccgctttcttcccctttggcgcctctgattttgtagcctgcaacatttcaatctcggctttcaatgcctcgatttcagtgcttctctcagccgcaagttcctgaagacgtccaatttcctttaccgctttcatatggtcatcatatggcactgtttttccacggccataggcaagtaccgttccactgtcatccagaatatcaaaaccaccgtcctggtatccttttttctgtgtctcgtcgatggtatattccctgtttccttttactgctctcatatgccctccttacgccgtggcttccacgttcatggcgcaaccttcgaccttcttttcaagtaagaacagatcgccatagttgcggttctgatacaggtaaccatctgccgtccggctgtcagttcccggagtaaacagcttgatgtagctatatttgtcacgacataccacgcaggatgtgtgaatcaggatccagttaatctgctttgcgtcggccgcggccacgcaaccagtagtaaaatcgtactttgtcttcatccgcgctgccggtaccatcttgatggtcacatcgtccagactgtgaaccttgcggttgattgtagacggagatgttactgtcatcactctctggagaccttcggcttcctttacaatcttattcatggtcggggtcacatacaggattctaccttcttccggaacaccagcttcatccatgtaagccatttctgtgtcaaacgcctcaaggaagttagctgctgtaataacatccgtgttaattctgcctgaataggtagtcatctcatcatggagtttggagtagcggtaggaatccttttctggaattgcctgtgtcgtctcaaactcattctgaatatttgccacagacagggtaaggtttgtctcgtcaatatccatcggatccacccagaactcaatatctctatcatgctccagcttcttcggaatccaactgttgctcagcgttccggtgttaaatcccggagtcctggtgtggtccttgtaaccggatactgtcatagtgggaagtttaatcgtctgtgcgttaataaacttcacctgctggttgctctgtgccagcgcatcagagcacagctcctttgcgtacttctgctgaagcaactgggtaaactgtgttgcgtaatcatatactgccatgtgttaaatcctctctttcttataatccgaacgcctttttcaaagcgtcatcggtcgttgcctgctgccctgttccgccagaggccccacctgcaagaagccagttgtccctgacgcctgcggtttaagggccggtacatcctccaggaccttattcagggccgtattaagggcctccgtgttgactttcccatcctgtcctatagcctggcttaagtcggccatcttgagcacatacgggatagtcttggcatcaagtcccaggctgatggctgcaagggttgcctccttatccagcatggcctgctgggctgccgcccgagctgcctgcgccgtctgtgtcagcgccgccacatccggctgattcttggccttctctgccttaaatgtcgccattgcctgctcggcctcttcctggctcagcccctgctgcttgaagtaggctttcagggccgtgtcttcctttgctgccagagtaccttccaacatctgctggatttttgaataatcaatctgcggcggcgatgtctgcccggttggtggtgtctgctgtcctgctgccggcggctctgttcctccggctccgcctgccggttctgcaaataactgtaaattcatcgaaaatttctttctcattgtttttagctccttccgttttgagagtgtcactctttgattcttcatccattgtcatcggtgtcaccggccgcgcacctttttaggccatgtcgcgtttgggcataaaaataacacacaagttctcccgtgtgttataatttttataagattaatttttgcgaggtgccattatgtatatttcgaagcggtccaggaaactattaaaagctgctgtgtcttcaaagccagacgctcagggtctgtactccggccccattcttgccaaagaacgcgaaatttgcggcgaggaagaggttctactcattcttcaatcattgaaggagcagagccttatctccatcccttatgccagccgtcccgacctcttctcacttacagaaatgggactcacatatgaagaattccgctttcatatgtctgtagatttcttcaaacgttccgtcctctgtcccatcgttgtgactgttctcacagaggcagtaatacatggagtaccagtgttgttagaaatgatactaccgtaggaataataaactcataatattcatctttcatttctataccgcctttctattgcgatatcgcaataataaaataccaccggccattactgactggtggtatcaaatacgtccctgtttttttaattctgcgacttcttccggtgtaagttttatcggcttaaatggttcggataatctatctttataggcttcatacgcttctttatcttgcttgctcatcttcctcttcatggtatcacctccaattcgatcatatcctttttctttgataatactctgtatttacaccctttgtcaagaagcagttctctttgttttggatatttgcttatggtttctatgtatgcaccccggcttccttcgggaacataaataacaatcttatagggcttgttcagggcggcgctctcaactacagacgtgctaatgaactgcttttccttgaatatatcccctacctctaaatctacacatgggttagtatccatatttctgtagcagatcacatcatgcttcagctttgacttttttaatgccgcggagatggtttccgcatattttgtcaatacaggatcttcctgagtttcatttcggagcattgcattcagcctctcgaaaaagcggtttggagccttatctccagagttataggtgtattttcttatcgcattgcgctccgcttctgtcaatgatgcaatccaatcttcagattcctttctaagcacatttacgacatgttcttttgataaggccatgaaatttccaagcggccgcctcgaatctgcatactgttttctgtccatgccaccagttgcgaaccgtacttttttccaattttcctttcttctctgatatttttcgcgattctcattgtctaaagaatattgctcaagcctcccaaaccgctccacctgtcgtgttgcgtattgctgttctgcttccttcttgtttgcctggccaacagcctccagttccttctccgtccaggtgtcatctgctgtagaaattcccggaaagtaggttgtatggctgtccttgcatcgagggtgatagagacccttggcaatggccttactcatgagtgggtacggtccatcggtcttcttccctcctgaccacacatcatcaatcaataccttgccgacaaagggcagacacttcgggcacgggttcccgcgcttggccatgatgactgtggatattccccattcctgccgcttctcgccctctccttggaggtaggctcgcttgctggccgtccgaatggccatgtcggcataatccgccagggtatgacgggcaccattggcatactccacacagttaagtccccgggaaagcatgtccttggtagccatatcaacggctttctcgtaggtaccggcgccggaattggcatatacctgggcgttaaatattgccttccggtattggtcatttgccatccggaggaccgctgtttctgcacgttccatgtcatgagtcgttgctttgataagtgcttccagcttccggtcattaagcttaaaaaactctgctgttgcttgggcagcctctttgcccttccaacgcttaaccagtagtgatgccttctgccgaaatgtcttcccatccatttcttccaataagccaaacagcttctttggcatgtttgggaatcggtatcccctctgtatagctttcagtatctggatttcctgctgcatgttaccggtctgccgtgcctgatagagtagttctcctatctgcccatttatagacttaaactgcttgctgtaccgtttctgattctcccgcttatacttctccaaagctttcagctgctccgcctgccacatcgaccagttatatccttcttttgtttcctcggcgcggtgccggtccacgttacgtatcatagaggctatcaattcatcctcgatggcttttaaggcggcgccgatatcatactcattatgttgcactcatcagcgccccctccgctccatcagctccgccttccatgagttggcagcgtttgttggcatacaccttaaatccctgtgccttaaattgccgcatcagtccttttagatgtgtaatgctcgtacacttatcacagcgcagctccgcatacccctgcttctcaaccgcgtaaatcccgaacggcacctgctcactcgccacctgcaggagcccctggtactcctcccgtcccatctgatacgtccggttcatcaccttgaccttcatctgcctttcctccctccatgttcaaccggaaatcaccagcggcctgattaattccagggtcttccatctctgcaatgccctgttcagtttttaatcgcttcacttcctcggccttccacgtctcatctttgctgtctccccacatctcctcgacctgagcctcaatgctcatgatattggcaccgggccgcgccttggaaagagtctctacctgagactcaaacgatgggttcgcgtactccccgaatgggatctccaccttaatctcctctatcggctgcttcagcaggatgcgataggcgttgatgcaagcagccattacatccggcagcgtctcttgcagggcctcgatgatggcgttccgagtgtagagcgtcgctttctccttctcccgctgcgcctcggagttgtccaacttcttgacatcaattcccagcgtgctggggctgatgattccctgtaggcagaggtccagagccgtgcagtaggatgctagatagctgtcgtgaggaatggatggctggtccgtattaatccggttctccgccttctccgacatgtcattgtccgatgcaaagtatcggcaatcgaaaggattcggttttaaaatctgtcctgtcgctgggtcatgcggtaccaggcactccggtatgtaggtttttgccctgcccgctctaagtgcatccatccactgggaccatgcctcatcgaaggcatcgaagctgtccagtttcccatcaaaaatagagccgccacggccctcatacttagttgactcatatatctgcaggggaacggccaggatagttgtcttatcaaatgtggtatccttaattcccttcgttgcctctatggcaccgatatctacctgcgtatctcccttatacagttcgttgcgtatgtatccataaccatagtgttcatacaggatatactgctggctccgtaccgtgtacggtgttttaaagaccacctctttcaggcgaccgcgctcctttacaatctcgatacgttcccctgggtaccactcgagtatcgggtactgactcaaggccgtgtcgatagttaccttgtaagccccatcaccgatgtataaaacctctttcaggctcttttccaatgccttgcggaacttgttctccttctcgatctctttccagagctgctcctgagccggtgaatcaaactcaaagtcgttcatatcggccaggacgatcgccgtcagaatccggatgatgagtcccggcaggccggtatgtatcttgcgcatctccatgcccggtgtacacttgctggcccagaacttatatttatccgcatattctgccagctgctggtacatctgctccagctcgttgctgtctccccgataccagatacggttgcggatggcgttcgcttcgaagtccaggacctcgttaatctggatgccgttcccactggccggcaccacattcagccagctgcgtacccctcttttgatattctcattcaatgttgatagccacctcatttcccggcctcctattagattctgtgcattctatctgtaattccaaatactctccaggtactgttgcttggtcagcattaaatagcattgcgtgcggccatccctctgggcccggaagagttacgataattggagtttctgtataatccttaccgttgatttttaaaagtctattatcaaaatcaatttccaaccgttgtatttccattacttctcaccctcctcaaatcctatcccctgtcggtatggaatccacccatactgcgatgcattgatggtatggtcgtttcggtcctccggtttatccttatcttcatcccagctgtaacggtcaagttctcccagatgctccacgcaggtgtccactaccaggtaacacccctgctggatccatccaagctgcagcttgatgcggtccagtatctccagtttcttgtatgcatcaaaaaagttatacagacagccatgcagccgcttgtacttgcgcaactctgtgatggttgcctggtccgcgctgtcgatgaagacatctttagcaaagccccattcctgccggttccgctccaagaactccacaaatttcacagccgtgtcactgggtgccagcggagtagacaggtccgcattgctgtaaaccttctcggccaggatgatgagcttacggtccatcgtgatcccctggaatatcatggcgatggtatcaggcgacttgctggagtaggatgtatccagcgctgcagagaactttcgaaactttatcttgccggcggcaatctgctgttttacccaggctgctgtaaccacatgctgctttcggtcgaagttcgggaagataagaccggttgccttgccgcgtaggccgagaatcttgttcttgtgaatcttagtccctactggcgtgttctggataatctgctgcagcttctccgccggcagccccaggttatgggtaaaagaaaagaaccaatgcacccagccgggttttggttcctctcgtaattcctctatgatttcttttggcgtctcatcggcccacacttcaagtggccgagaacaattaatatactccttgtagacatccagtccagggtcatctgggttaagtgtcgccatcagatagtcacatcgcatggcagcctctcgcacaaaatcgatgtcagcggtgttaatctcatcgatgtagagacagccgtactgaccgcccagtgcgtccttccacttgcgcttgttgccgtagccgacaacaaagataatcttatcgccacccgatgtgtggaacaacaaatggggcatcttgtattcgccggaaccgttgcctttatattccacaagaacgccaaagtcatccaggatacccagatccttgttgatgatgttcttctcggcagcaccggtatcgtcggcagccaggatgtgcagtttctttgggctttcggccaccttaagcataaacttaaatagccccactgtcgttttaccggctgccgttgtcccttccaggaactccaccggcgcatcacaccgaaggaatgccttatacttttccgataacagtaatcgctctgcgctcattatccaccgcctcgcatctgctgaagaaggtcatccagcttagttttctcggtgtcaaggcctccggacaaattgttctctaccttggtcgtatatccgtatttgctcatccagagcccagcgagctgagagggaattatctgaagttcaaactttttccgcgcatctgcctcacattcctctcgtatgcgcgtgacgatgtccgaatatctcttctttcctgcatacgtatcataaaaaatcgaccttggaatctttaagtacacacagaatccctctatggtatacgtaatgctccgcttgagattcgcagaaacgaactcgctgttcttagaactgaaatcatgggtaagaacctcttgattgtcacaatcctctttatactcttcccagagcatttccatctcttctggagatttaatctttaacggtcttcccacaaaatcacttcctttcagttttgggtatagaaaaagagccacgggtgggcggctcctaattaagctatgtcttttggatattctgttaaaatttcatactttgacagccaccattggttacttccaatgtcaaatttattgtaatcaatgataagagcttttattgccctttctaatacttgatacccgtttataagttctactcccacttcattggcatacttaatagcatccttagtataattactagttgtgataaatattaacttctctgcaccaacggtttgattcgcacccactaatttttgaatcagtggtctaccaatattattgtttacagaatagcatttgcattcgaccaagctttgaatgcctcctcggtgcaaaatcaaatcaaatccaccatcgtgaactgctggtgtaatttcaacatcatacccttcttttttaagtatttctgagcaaaacaattcaaaatcagttggtttttccttaaaactattaattatatcttctaagctatgcatattagatagtttagtctgctttgctactaacgtttcatattttatctgctcttgtttacatttctcaatgtcaatttgtttttgtctaagctcgcataccacattgtaaagtttaaacggatccctgtatattattttatattttcctacatataatgtacactttggccatattaccctgttatttgttcttcttttatctgccgtgccgtcctttttactgtaacgccaatatggaaattccaagaaaaaaacatttgttctgcatgcattccttttcttactaatccttaacttggaggaatctaagataacgccatattctttattgaattgtcttttaatgatgaattgaatataaaatctaataaatataattatacaaaaaactagcaaaagatacatggctatatcaacaatatctaagtgtggcatttccgactcctttatattttactttttttattttatcatagattacgacaaaagaaaagcacccatctcacgacaggcgcctttcaaaaggaggagtgttcccactattcaactagttatactttttctcgcaagcggcgcatccggaatcgaaccggaacccagggcgcgaccctgtccacctgccgttggtgggatgctccacatgtgccggttgcccggcatagccctgtattgtttttggtaaggtcaattaagggtaactttttgaccagtccgcattggcatcagcagcccctcgcaactccgcccagagacgtctcccatgttccttcgctcggccactgtttccagcttgcgcttcaccgtactttagtcggccttgctatatacttatcactgcctgccttgccggctgacatcggagaggatttctttcaccggttccccctgcggtgggttcaccttacattcgcattttacatatagtgccgactcgcgtgccctgcggcattgcccgttaatatggcctggcttatgaggggttacgcgatcccggcgaatcggccaccaggcttttacacgctggcggccgtatgggggaggaaagccgctggcttaaatgcctttggcttcatagtacactataacagtcgtagaacgaaatttgtgaaataaacgaaataactttaaggtgttttcatgaaatttgtaaactccattctcacactatctgccgtcgccttacgccccattcttacagccacctctccccacgtcaattcttcgaagaacttcatccgaataattctctgcagccgctgtgggaccgtattcaaccacgcctcgacctgtaccttaatctctgctgcagctgccctccgttcctccagcagttcctcttcttcatccaatagccccggtgtctgtactgtcgcatatgctagcccctctatgtgatagctctgggccgcatacggaaattcttgcatggatcccttgacagaatcctgaagcatcactttacgccgctgcctcagtctctgaatctcccgctctgtctctttaatcagctcacaggcatctatatactgactaagaatctccttctccactggtatcacctccatcagtcaacaaatttatttcggccccgcttacgccgatactggataatctgcacatatgtaatggatgtcccgcagttcagtgtcaccagatggggatactttgctgtaactcggccacgcatcattggccttactccgtttccctgctcatttttccatgctgggtctgctacagtaaacgcatcacctattttaacccggttcctgcacttatctacatctttggaaaagatggcccccatccgtgcaagttctattttatctctgttacgcttcatcagcttctcctttctggcttgtcccgcagcccgggaaccggacacaacaccgtataacaatacgccggcatcaccgccgaccaggtctccggccgcggcccttttaagatatcctcctggacgcttgcccgccggcgccgctgctccgccagttttatgtaatctgtcttgcccgttttgattcctccttatcttcagattaatcaaaataacctaactcgaaccctagctgggtgcatcccccaataattgttctaagatcgtcaccggcacaatgtgacatcacaaacgttaaaatatcttctccattttctttcctgatttcacaaaaaaatcccttttcaatcgtctcctccgttccatctgaataatgcactgtaaatttttctatatctttttcatcttctactgaaacaccatcttcatatttcttcaattgctttcctcctctaatcctcagttatagttcttaatcgcatctacacaatcattccatccagacacatatgattctggtcccaaaggtgtaacatctttcttctctggtacttcctgcaatggacaccaagacggcttgtttctgttgcatactgcaattgatacattcttttttagtatggtgcaacaccagggcattcctctaaattcacacacgccacaatgttctggcatgttaatcaatatcatagccttcatattccatcctcagttaaatgtcaattttacatataaataccttgcttctctatcttgtaaatgttatacttttaaaaaacaaaggcggcttttgtcatggataaaatcacaaatattgactatcgtgtattatgctacatgaaaaaactcaattcttgctttattgatgaaatagcttctaaatttggtcaagccggtcttgcaagcatagataatcttgatgatttagggtatatctgtatgccctatgtttctggtcttactgatgttatagagggtgaatccggtaaaacttctagtcaaatggtcagtaactgcatgatgctcactcaagaaggtgaaaaagcaatattagattacaaacagcaactaaaatctcaacgctatgacatcatcatcaaagttttaccaataattatttcttttatagctttgttgacctctatttgtgttgcgatttataaatgatttatggacttcgagtccatcttattttagtagacaagtctctattaatacgatgctctcggttttcccaattaccacctttttgcccacctaatgcgtaccaattgtctgcttgatatacgattccttcatgtcctgcgcctgtactagaatatgcaattaatccttttacgtttggacaatgctttcgtatatatttacgtgccatacttaaacatttactttcaataaatgcttcagtatcatctacaaagtacattctagtcaattctaaaatatttttttgattgatttttctacttgtgggacgcccccacatcatgcagccaagaatttcttctgatgcatttttaaaacaaaatcttaatatggcaccagctgggacggagtggagataatgatattccctaatccaattatcaactgtggtatcatgttccacatataatctcacatttttctgttctccatccggaaatagtttaatttgttctatcatataatcaatcaccagcctactatacaaaatgtcaattatctgattcaaacccaccataagggcattcactttttgcgtgttctccagggcaggtataacacttgttacaaatttcgcattcgtcctgcttctggcaatctggacaaatgcaaacttcacaatctttcattcgttcacctctaaatcttcacattctgattgtaaccagtgcagcagacacccgtcgcaatctaacccaagtgcatttcctccatctttacacaagtcgcaaaatgtcaccgaataatcaatgtctccaacttctatcttttttaaaaattccatcagttcttcatcagtcatcgaccggatgcgttcggcattagtctgtttttcttttcttgcgtattcgtctgtgtaggccctggagcagtgcatgcaatcctgtgattcaagattttcatgtatgcatcctttacaacttttcataagtctcctttccggttccaccgttaaatcctcagttcaattcttttctgattgcttctgacagttcagtttcccgtccattgcagttctcgatttcttccactgcctgctccaatagtttctgcattttcttgtatcggatctgcatacaagctatttcagccagttgcacgcctgtcaatatctcctccggctccaagccggtatcttcgtacctggataacttttctatgcaagcagtagcttcaaaatttccacgacaccaacaacctgctaatctatcgacagactttccctctgctccatgtggatattcttcatgtgtagttaatctattcattgtttactccttactcattcaaatcctcagttaatcttcccattctttctgtagccatttcactttgcatttattacagcatgtattatcttttccatcgtaatgacactcatcttcgctagggcaacttatgtaatcagctacaaaagataatatttcttcatcttctccatccgccgataacagcaaactttttgcaattgcttccaaatttttcatatatttactccttaaaatcttcaatttcctgcaatattgccttgcaggcatcgtcccatcctttagcgtaatcgtcgcttccgtcacagccagacaggcctttgattatttcggccagatagtggctctgcctgtccagttttttatgatccatcgttcaccatctcccataccatcttgtcatagtcgtagccgtgttcctccagattgtggaaccgattcacagccttttttgccccggattgcttcggcctacgcgcctgaagaataagcgtctcaaacttttcccgcagctttttggtactgcggatattggtctgccaaaacgggtcctggatggcaaattgcaatgcctcctgtatatccgcttcgctcctgctgtcaagccgcttcatccgctccacgtggacacaccactcgctcttttccgtcgctgtcgttgggacctttgcacccgggaattgacgcagacaagactgcaccagggcattgacgcattgcatctcaaacgattcttcggtaaacgatgttggcccggcctttcggcgcggagtgtcaacgacgtcttttatttctttccttttttccttctttccttcttctattgttgccggttctgtgccggttgactgccgattctctgccggttgactgccggttgactggtataaatggtagttttttattgtaaatacagtaaatttgggctgtcggttgactgccacctctccggtactttttaaatgttccagtgccgtcctgacgttttttattgacaatcctgtttcctgggccaatccctggtaggatgatgcaaaggatccgcgaggtatctctacaccttgaaatcgcccatccttccagtttgcttttaacagcatgtgaagaaacagaacctttgtattaatatcggaataccattcccactccagaattcttcggctaagtttaatataatcgctcatatgactctacccgtgccgaacatgtgaagttgccctggcacatcctttcggcgcgacttccggcccacgaatttcatggcgccagcttgggcagttttaatgctgataactctgctgttctgccgcatcagccaccgttttgtttcttcccggccttcttccgtcgtttccgggagataatatcctctgccgtcatcacagcttaaaatagcataatcccgccttaataactcgattgccctacgcaaagtacggtcgccacacttaagtttctggcatagctcccgacgcgtctgtgcgtttttatgccctattccaagggcgttatatacagcaaatgcaaatacctcaaaatcctttatctccctcacctccttttgggagcgggcggcctcggtctgaccgcccgttacacttaagtggcattgtatcgtgatataccaaccttaaaagtgcatgaaagttgatagttgctatgtaaagcctttcggcactacatctaattcttcgatctccacctcaatcctcggttcatccgcataatagaactcatgcgttgtattctttacgaattgcggagaatcattctgtatcacaccgcatcgaatcagactgtcttcaatgactttatctgcgaaagaaaatatgttcatcacatctcttttctggccttttaaaggctcgtagaaacggtaatgcaatatcaccggcttcgttgtctgaaagcgttttaatcctaaacgaatggcattacaggcaatcatggaatactctttcttcatccgtccgcctgctttcgggtttgtcccaagctgatggatataatcattcagggacgggaatgtcttgtctccgtaataggcccccttgattacaaatttcataagtagctttctccataccgtttccggaactgttctctggttcctatctgcgcttcataaacggcttgtcccaacattttcgatagtttttcggccataggatttccgtgtatttttcggatattctcattcatccgatggcatccctggcagataggagctttcagtccgtcttcctccgacaattcccgacggccctgtccaaataccagatgatgttcttccgtcgctggtcggccgcagacgaaacaaatctttgtatacttagtcacaactgtctgactcatgctcacacctccgtcaatagctgtgtgtaatgtattggcgccttaagcacttttgtatgcttgcagtaatcacactgttcgcatcggatcggttcaatctctcctgactttaaggccaggattttatgtatgttctgctctacctcatacagcttctctttcaagtggttatcatcgatatggataatctcaatatccgtttccttttccttgctggctgctgcgatgtaaaacggcaggagcttgccggtattctgccggaccacttcctgatacaccgcgccctgcaggtcatacccccaatactggataaaatccatatagccggtgtcacgcacccagaatgtgtcccggatggatttcatcaccttcaaatcaacgatgcagcaatccggcagatagctgtcaatcttaatcttccattttgccccgaacagctctccggtcatgattacctgtttcatgcctgacatgtatttcataaaatattcatcccgttcaatccggttgatgatttcctctgcttttcgatattctgctttcaaagccccttgctttgtaaaaatctccgggttctgagcctggaacagatttaatgttccttcaaagtgagaatccacataggaacctaccagaagggatgttgtcttctcctgctcccactccccgttcagtttcgccattgcctccgcttcacaagggattttccccagactgccgcagaatgatttatactggctgaccgataaatactccctgtctgcctctgggctaaaataattctctgctgtcaatatcatttaaacggcccctcctctccttctggcgggtaaaacgggtctaccgcggcaggcttctctgatggttgtatatctgcaatctccccttctacccggcatcccatcaggctgtttggaatatataccctggcgaagaatgcgctggcccgataaaccagcatcagttccggcatagtctgccatttagaagtttcgttcccgtatttgtccttcttagaaaaccatccttcggccttcgcgatgccgattgtcacttccggaccgttgacgatctcgccagtctctctgcgtactgcctgtatgtagcatccccagctattggttcccttttcacctgtataaatcggccgcacgttttgatactctgggtttgcctttatcagagacatgcaggcttgtccactccaggacggcttcccctttaccacatacaggttctgcataacaaacattgggcttacctgcatccggtttgccatatcaattgcgatcatgcagtcctctggcttgttctggtaggatgccggaataatgctggtttttgaaaatgcctcagcaactttcatcagggcattaaaattcaactctgagccaaagggattcgatagcgcagtagtttcttccatgttcatgatttcatccataacgtccctcctataattccacaaccgtcagttccggatcatccgtagttctggttgcgataaactgcagccctttctcctggcacttccggtacaattccttcctcatggccgtggatagcttctcgactccatcaatcaggataatctgaagaccgttcggcttctggatagccacatcaatgcacaaatccaatttttcgccatcggacagattgctgatcggcaggccgtgaatcagaggaattccattttctacggtcagtccctgaatcggtattgttgccttctccagaatctctcccggaagtcttctggccttttcaatcttttctgtcaggctccgggactccccgatcatctcctccacttcgttctgcagcgtttccatgcgatggtactcattcaaatgacctttcatttcttctgcataggagactctttcctctaactccagtgtgcttcgcagagacattccggcatattcctcatactctgccacctctgcatcataacgggccacattcgccttataagtttgttctgccagagcaatcttgtcctgctttttatctcccagtccagacagttctttttttaaagaccgtatctgttcttccaatccggcaatctgttcttttaagccggtttccttccggctgtattcccggtcaatggatgccagttcaatttcccggtccgcctgatactttcgtaccttattgtcccggttctccagcagccgctttgctttttcgattgtatcgttcgatttccggatgcgctcaatttcccggtacagttccccgacgttctcattttcccaccgttctgcttcgtatcccgctgggatcgcatcggcgatatcctcaataaacgctctcttattccggatatcccggttaatatcctgccgctcgcgaaaatacgctccgttttccgactggatgtcgttcagaactgagagaatgttctggtcgtaagatacccagcttggaatttctccgaaccactcccggatggtattcatgtcccaggcatactcaatcatgtccaggataatcgcgttctgctctttttcggacttctccataaattcaaccggtgatagctgcaaaggagaaaaaatatcccgcaggaaggtctctggacttcccacttcatggccgtccttttttacgctcttgtaatccgcctgcgctgtcctgggctttcggtcaatccgtatgccgttgtccgtctctatcaggatttcaccttcctcggctccttttttgatgatataccggcggtccgacttattcgtcagggcgtaccggatggcatcaattaccgatgtctttccggttccattctttcctgacagctcaaccgacgtcccgtctgcttcgtactctgtgattccatataagttacggatcttaatttttttaattttcattgatttcctcccacaaatcccttatactaagggcataaaataatttacttatttacttgaacctgtccggttgcctccggcaggttctttttctttctcggcatcagcttccccgtatagcggtttactccgatggcggccccagctctatttgttccgtttcttcgtctgctcattttggcctccctactggtttttaaaagtaaccgtcatccctgggtattgctccgtcagcatctttttagcatcactgaccatcacattcgctgccaatgcccactgcacaacatcgcaatgctttttaccatccaagtaacaccatatggttgttttctttctcttcatctttatcctcctccgttttacatccatccggccgcccgcaggaacacccctgccgctacaatccatccgtatgtcatccacaccatcatgctggtcatccgctctacctgcttgtttgcttctgcctctcgtgcctgcttgacagccgcgggtccatcgttataatgtttgtgcattgtgttcacctccctcttctcctgggcatcgaccgaacctgtgcctcaatctgcttttcccaccagattttgaagccagcggtgtcgaaaataaccggactttttgttaatgccggattcatctttgtggcaaaggtctggtttttatccccgtaagcccgcttcagataggtttccgggaatcccattttctgaagttccgacatcttcatgacaggttttggaaactccagcatgcaatcacgctcctttcttgattttatcgtccttatgccctatactgtacttaggcgttgtagcatcgaatacagaagaaaaggtccgatatatgatagataaaaaatcttataaacttttaaaagcactctatacggctgattacttaagttatgagcagatagacgcaattacaagtactctcactccaccgaatggcttaaataatgttgcactgtacttagcaaacagggggttaattctccggcactatatagattctgatgataaagggatgcctatttatgatggatatgtaattagtgctgatggtcgtgcatatattgaagagcaacggagcaggtatctaatgtttgttattccttatggaataaccacatttattgctttgcttagtttattcacatctattgctaccaattggaatgaaattcaccatttttaaccaccattgctcaaatgtttcattaggcatttttaatacattcacacaacgatatcttgaaatttctttctctggtaccacatccctaatctgtctcaagattggatctacataatcagtttttgtttttcttctgagaactttgtggtaccagtgatgattatatctcggcatcccatcccatcccttcggtttatcgcctaatcgtgtatcccatttccatgtgttaagattttcataaatctcacatagttccgcatcagtgtaattattaagcttcgtattacccctcccttctcgttgacacatgcatgttatggtgatatattggttttatcgaacatgtgtttttatttaagaaaataatcaattgggacaccgaagtaatcggctaaaattttaagtttgtcggcctttggcttactgcggccagttttccaatccgataaaactgattgggcaataccggtgtctttagatacttgatatgcagttttgtcactttttgacaataaatcagcaaatttttcgtacacaattacacctcctttctgttaacatgttattgaaattactacggaaatgtgatatgctttgtttaccagacgaagtaaataacatttccgcatcatacaaatgataccgcattggattttctttgtatgttcatactatactatgcatttccgataaagtcaatatttttttcggtttttcttagtattgtctgcggtttgtgaaaggtggacaaattatgtatgaagtttttgagcaattgttacaaaaatatggaataacagcctataaagtatcgaaagatactggaattactcaatccactttaagtgattggaaaagaggacggagtacgcccaaaaccgataatatgaaaaaaatcgctgattattttggcgtatctgtagaataccttatgacaggtatagaagaacctaaagagaaagaaattacacttaccccaaaggatgagagagacattgcgaaagatttaaatagcattatggagaaacttagaaatggtgagaacggaccggcgagttttgatggtgcagagatcccggaggaaacccaggagctttttgcacaacagttagatataatgctccaccatttaaagaagatcaacaaagagaaatacaacccatacaaaaataaaaagtaggtgactttatgggtgaaagagaacgggtcaagcgcctcgtggcgtattgcatacggcattacagcactacagatccttttgaaatagcaagacaaatgaaaatacaagtgcaatttggccctttgggagaatacgcaggatgctatttatttgccaaaaatcacagatgtatttttatcaacgattgcttagaaggaccggaattgctttttgtcatggcacatgaactgggccacgccatcatgcaccgaaaacaaaattgttacttccttcgtaactatacgtatctaaattccactgtggaaagagaggcgaatttattttcggcgtacatggtaatatcagatgattttttgctatcaagagaatgctgtaacagtgttgaaatagccgatctatatggttgtgattatcgcaccattgaaataaggatgaagatatgaggaggtgatcatgtgaaatacaaagaatttttagaatacctagaaaagaatcttactggttatcaaacatttatgtttaaagccatgcagttccagcgagcaaagaatgttaaacgacctgcaaaaagccgctggacagataaaaaaatggagaaggctgctggtgagatgtggaaaaaagcgatggaaacgctttacaacaatctaaaaaaagaaattaagtccgattttccgtcagcttggatctcctttatcgaaaagaatgcgattctggaatcagtcaatgagagtatcagtgaactggacttttcagaagatgcagcctagattaaaatagcctttggctttttaataaataaatctacggaggaaaagagttatgaaaaaagaaaaaccggcaacaaaaacatgtaagcactgtaagacagagataccttatggtgcaaagatatgcccacaatgtagaaaaaaacaaggaccaggagggtgtcttacagctattattatagttgttgtgattggtttaatcggctcttgcgttggcggtaaaagcaatgaggaggatccttctaatactactgtcactacagcccaaagcaacaaatcgaatcaagaagaaataacggccgctcctgaaactacaattgctgaaaaaaccacttttgacgtgggtgaagttgcagatattaaaggtattcaagtatcactgcttggaacaactgaatcaaaaggctcagacttcttaacaccagacgaaggaaatattttcatcttatgtgaatttgaaatatcaaataattcagacaaggatatatcggtaagttcaataatgagcttcgaggcgtattgtgatgactactccgttaatcaagatattcttggcttgcaggctcccgaaggaaaagggaagaatcaattagatggttctgttgctgcgggtaaaaaaatgaacggtattatagcatatcaggttccagaagattggaagaatcttgagattaagttttctccaagtttctggtctaataaatctgccacatttattgctacaaaataaatagtaagcaaaaagcccctgtgctggtaacacagaagctttttacataatctcttgccggaagctccggaagatttagtttggtttgaacacctaaattatatcatcctcggagcgtcctggcaaggggcgtattttttatacccaaaattaattgcggtatcgcaacaggaaaggatgatataatggcaaagcaaaaatataaacctgacaaatatggtatttatcgtactaaggcttgggacggtacttatgacgaatacggccagaaacatcgaatcaacttgaaatcaagaaagtccagcgccgaccttgaaaaacaggtcaatgcattgaaacgccggattgaagaaggaaatcaaatccagacatcggatatgacctttttggcctacgccgatgaatggctggagaccagcaaggctgtccgggagtacaatacaagaatgatgtataaaaatattatagacaagcactttgccgcgctggaaggcgttaagctgcaggacctaagaaaagtacatttacagctacttatcaacaatgcatccgaaaaacctcgtatatgccaacaaatcatgttgacatataaacaaattatccgggctgctgtggatgaacgacttctccccgaaaaggcgctgcgggaactgtgcgaaaaaatcaacaggccaaagtacaaagccagagaaaagcggccccttactgccaccgaaaagaaggcaatcaaggctgctgacttctctccgatggaaaaaacattcgttttgatagtctatggctgcggcctacgccgcggggaggtcttggcactgaaaccactggacgtcaatctgaaaacatctgaattgaccgttcgaggggctgtagagtttagggtaaacaatcccaagcagaaggctacaaagaccgagaatggggcgcgtacggttccgatgccaccattcctgaccgcccacatgaaagagtatctgaaggatctgtcctcaccatatctgatgcacacccaggacggccgcatgatgacgaaaagtagctatcggcgcatgtgggaaagtatcatcagaaaaatgaatctggccgccggcggaactgaaaacctgtacgtcattcacgatctgactgcacatatcttcaggcacaattattgtacggagctgtgctaccagattccagctatcagcacaaagaaaatcgcggagctgctgggcgacacagagaagatggtcatcgacgtttacagtcatattgtggaagaaaaagagaacgttcaagaggttgtaaaaacagcgattgcgctgtgacagcttggacagaatttagacatcctgaaaaattttgcttacttggacagattttagacatgttttttcgttgtttttctataaaattgcctagatatttttaccgtcaaaaaaagcggaaagccctgtaattacaaggttttccgctatctttcattcatgaggcatcggggattcgaaccccggacaacttgattaaaagtcaagtgctctaccgactgagctaataccccattggtatgaaaccaaagtgcccagaaccggaatcgaaccagtgacacgaggattttcagtcctctgctctaccaactgagctatctgggcttgtccatttttcacttacagcgcgtatacaaataagttgccagaatcgctcatatgtgcaagcactcttgctcggttctggcaactcatttatgcacgtctcattgcaaaaaaaattgcgggggcaggatttgaacctacgaccttcgggttatgagcccgacgagcttccagactgctccaccccgcggtattatttacatattctattatatacaataagtgtgaaaaatacaacacctatttaatggatggaggtggattcgaaccaccgaagcgtgtcgcaacagatttacagtctgccccctttggccactcgggaacccatccaaatatttaaagcaaagccgatgatcggactcgaaccgataacctgctgattacaaatcagctgctctgccaattgagccacatcggcgttttatagaagaaatggggcctatagggctcgaacctatgaccctctgcttgtaaggcagatgctctcccagctgagctaagaccccttatctttataaaaacgacccagatcggactcgaaccgacgacctccgccgtgacagggcggcgctctaaccaactgagccactgggccatatataccttcaaaaccacatattgaaattcatccgtttaaatcataaggaatcgcttcctctatcctatccttaacctaaccttttggttaagccctcgaccgattagtaacagtcagctgcacatgttgccatgcttccacctctgccctatctacctcgtcgtcttcaaggggtcttactcttgcgatgggatatctcatcttgagggggcttcacgcttagatgccttcagcgtttatcccgtcccgacttggctactctgccatgggcttgatacccaacagatacaccagaggtcagtccatcccggtcctctcgtactaaggacagctcctctcaaatatcctacgcccgcgccggatagggaccgaactgtctcacgacgttctgaacccagctcgcgtaccgctttaatgggcgaacagcccaacccttgggacctacttcagccccaggatgcgatgagccgacatcgaggtgccaaaccactccgtcgatgtgaactcttgggagtgataagcctgttatccccagggtagcttttatccgttgagcgatggcaatcccactttcataccaccggatcactaagtcctactttcgtacctgctcgacccgtcggtctcgcagtcaagctcccttatgcctttgcactctttgaatggtttccaaccattctgagggaacctttgagcgcctccgataccctttcggaggcgaccgccccagtcaaactccccacctgacattgtcccaccaccggatcacggtggctggttagaaatccagtatcacaagggtggtatcccaacagtggctccaagaagactggcgtcctctcttcacggcctcccacctatcctgtacatgcaataccgaatcccagtatcaagctggagtaaagctccatggggtctttccgtcctggcgcaggtaaccagcatcttcactggtatttcaatttcaccgggtgcattgttgagacagcgctcaaatcattacgcctttcgtgcgggtcggaacttacccgacaaggaatttcgctaccttaggaccgttatagttacggccgccgtttactggggcttagattcaaagcttcgcttgcgctaacctctcctcgtaaccttccagcaccgggcaggcgtcagcccatatacctcaccttacggttttgcatagacctgtgtttttgctaaacagttgcttgagcctattctctgcggcccactctcgtgggcaccctttatcccgaagttacagggtcattttgccgagttccttaacaatgcttctcccgccggccttaggattctctcctcatccacctgtgtcggtttacggtacgggtacatatcacacaatagcggcttttcttgacagcccctacgccaacttcgctactaatgttcgctacgcgtcacgtcctcctgttgttaagcggatttgccagcctaaccagtcctacgcttgccccggtcttttcattcccgggtttgacttcggttctgtgtccccacagttctgatgatatgcagtacaggaatttcaacctgttgtccatcgactacgcttttcagcctcgccttaggccccgacttacccagagcagatcagctttactctggaaaccttagatattcggcctggaggattcccacctccatctcgctactcattccggcattctctcttctatacagtccacagctccttgccggtactgcttcgctccgtatagaatgctcctctaccaatcatattaatatgattcctaagcttcggtgttgtgttttagccccggacattttcggcgcaggacctctcgactagtgagctattacgcactctttgaatgtgtggctgcttctgagccaacatcctagttgtctttgaaatcccacatccttttccacttaacacacactttgggaccttagctgtaggtctgggctctttcccttttgactacccaacttatctcgtgcagtctgactcccgtacatcatctgtctggcattcggagtttgatattcttcggtagactttgacgcccctaggaaattcagtgctctacctccagcagactaatacgaggctagccctaaagctatttcgaggagaaccagctatctccgggttcgattggaatttctcccctatccacacctcatcgccacccttttcaacggatgtgcgttcggtcctccattcccttttacgggaacttcaacctggacatggataggtcacccggtttcgggtctgcacatgctgacttgacgccctattaagacttgatttctcttcggctccacaccttaagtgcttaaccttgccagcatccgcaactcgccggaccgttctacaaaaagtacgcggtcgcaccttaacgtgcttccacagcttgtaaacacagggtttcaggttctttttcactcccctcccggggtccttttcacctttccttcacagtactatgcgctatcggtcactaaggagtatttagccttgggggtggtcccccgacttcccgcaaggtttctcgtgtctcgcggtactctggatcctgctgctgcctattgttttcatgtacggggctttcaccctctctggctggtctttccaggaccattccattaacaaatcagctcacgtatgcagtccttaaccccagagtgcacgcactctggtttgggctctttccctttcgctcgccgctactcaggaaatcgatgtttctttcttctcctccgcctacttagatgtttcagttcagcgggttcccttccatacgttatggattggcgtatggatacttgaggtcttctcaagtgggtttccccattcagatatctccggatcaaaggatatttgctcctccccgaagcttttcgcagcttatcacgtctttcatcggctcttagtgccaaggcatccaccctgcgctcttattagcttaaccaattgacttccacctgcgggtgcgggttttggtctaagattcatagcgttgaatctttggtttaggtttacaataaaatttttggtttgttttggttacactttcgtgtaacacctcggatgtcttgattttgtctctcttttctcccttgtggcaagccactcggaagagtttcgaaactctatctagatattatttcaatatgcagttttcaaggtacatatctgactgaactttatcagtcattagcaaactcgataaactcaaattcactaatcactggtaaaaaccagttatatggaacagcacttccctgctggagtgggttaacacatcgtcgtcacagatgtctttttcatctaaacaaactacgaattcatccattcagatgtgtccgttctatataaaacactcttacgagtgagtttttttaagaaaaatccggcatccacctgctttcccatatcgtctccaatatagtatcatcggccgctcaggtcttaaccatcgtgttcgggatgggaacgggtgtgacccctgagcgcatcgacaccggaagtgtctgagcttgaaaactcaacagtatataaaacctctacttcttcttccttagaaaggaggtgatccagccgcaccttccgatacggctaccttgttacgacttcaccccagttatcggtcccgccttcggcagctccctccttgcggttgggtcactgacttcgggcgttactgactcccatggtgtgacgggcggtgtgtacaagacccgggaacgtattcaccgcgacattctgattcgcgattactagcgattccagcttcgtgcaggcgagttgcagcctgcagtccgaactgagacgttatttttgagatttgctccacctcgcggtcttgcttctctttgtttacgccattgtagcacgtgtgtagcccagatcataaggggcatgatgatttgacgtcatccccaccttcctccaggttatccctggcagtctcccaagagttcccggccgaaccgctggctacttagaataagggttgcgctcgttgcgggacttaacccaacatctcacgacacgagctgacgacaaccatgcaccacctgtcttctccgccccgaagggaaggggacgttactcccccgtcggatcgatgtcaagacctggtaaggttcttcgcgttgcttcgaattaaaccacatgctccaccgcttgtgcgggtccccgtcaattcctttgagtttcattcttgcgaacgtactccccaggtggaatacttactgcgtttgcgacggcaccgaagagctttgctccccaacacctagtattcatcgtttacggcgtggactaccagggtatctaatcctgtttgctccccacgctttcgagcctcaacgtcagttatcgtccagtaagtcgccttcgccactggtgttcctcctaatatctacgcatttcaccgctacactaggaattccacttacctctccgacactccagttaaacagtttccaaagcagtcccgcagttgagccgcgggctttcacttcagacttgctttaccgtctacgctccctttacacccagtaaatccggataacgcttgccccctacgtattaccgcggctgctggcacgtagttagccggggcttcttagtcaggtaccgtcattttcttccctgctgatagagctttacataccgaaatacttcttcactcacgcggcgtcgctgcatcaggctttcgcccattgtgcaatattccccactgctgcctcccgtaggagtttgggccgtgtctcagtcccaatgtggccggtcaccctctcaggtcggctactgatcgtcgccttggtaagccgttaccttaccaactagctaatcagacgcgggtccatcttgtaccaccggagtttttcacactgtatcatgcgatactgtgcgcttatgcggtattagcagtcatttctaactgttgtccccagtacaaggcaggttacccacgcgttactcacccgtccgccactcagtcaattcaacttccatccgaaaacttccgttaaatcgcttcgttcgacttgcatgtgttaggcacgccgccagcgttcatcctgagccaggatcaaactctcatgtttaagttttgattccgttcaaaaattcgcttggctaatttttaaaccgtattactgttgtttggtttttttgttctgaatgttctctcgaacttctaggcttaaccaaaagcctttgttctttaagaattttcaaggttttacatactgttcagttttcaaggttctttgttgttgaacgctgtcgtttgttctcagcagcaacttttatatcttaccataattgtttttgtttgtcaacaactttttttatttttttaatttctttttttgaaaccgccgctcgttttcagcagcttgaatatcatatcataactttcattcggtgtcaacaccttttttgaagtttttcaaacaatatattcaataggtttttttcaaaaaagaaaacggagaaagagggatttgaaccctcgcgccggttacccgacctacacccttagcaggggcgcctcttcggcctcttgagtatttctccgcagttattacttaaaactattaagttgaactatgcggcttggacatgctcatgtcaagcgcatggtcaattatactaaataagaattgggttgtcaagcctgtttttccagatatttttatatattttcatcaatcttgttttgaatccgatcgtgcactatatctgcgatttcctttgtttttaaacctacatattgatccggattgagcggctccaggaagtgaacctggacggtttctttattaatagaagaaacaccaaacggtttatagctgtcgatcagagcaaccggtatgatgggacacccggcatttacggcacttttaaaggttcccgctttaaactccaatatccggttaccatttctgcttctggttccttccggaaatataacataattcttcccgttttttacatcctcagtcatcttgtttataatttttaaagaggctctcacatctttcctgtccattggaattgcgcggagcagcctcgctatctgttttaccaggattatttcagctacttcctttttaaaaacaacacaaagcgcttttggacatgcctcgatgatggccagcatatcaaaaagtccctgatgattgggaaacaggataaatccattttcttcaggtatatttttcaggcccgttttctctattgttacccgccccgtcctgtttaccttctctattatttttctgagatagtcatacctctcctggtccgtatggctgtcgtcctccctgcccagtttaccgatacggtaaaaccagcccggcacccggattatatttcgtaataccatatatgcaatgcggttcatattccttcctctccccatctaatgcttttcatatttttgacggttcagccgtcccatggccagcgcgcttccgatacaccccgagagaagtcccactgccgcacaggcatgcgccacctttggaaaaaccgacgccagcggaagcagtctgattccgccccgaatacatgaagctgtgtaacggcaaaatggatcccccaccggtacaccagatatagcagcgccaggggcagaaccatgccaagtatccccattaccagtccctcgactatgtaggggattcggataaagccgtctcgcgcgcccattagaaacataaccctgatcttctcatgctgggcggcaattcccactcccaccgtattatagataagaagtactgagatcagaataatcgcggcagcgctgccgtatgtaattgtagtcattgaatttttcaccttcatcactgcttttaccgcatctgccgagctgactgctttacgtacaccataaagccctcttacatagggaagaaagctttcctggctttcgacatcctttaaatacacctgataattattggaatgctccagcggattgtcatcttcaaatactccttccagaagatttttatcctcaaaataagtatccttaaactggttccatgcatcctcggacgaggtataaacagtaccggtcacttccggccggttccggatcatctccccaatctcgtccacgcggccggcttccgccgtatcatcaaaaaaaaccacgaccgccacctccttttccgtgtggtgtattgcggtattgacgttcagcacaataagatagaagattccaaacagaaaaatacaggccgtcattgttataacggaggcaaccgtatatattttatttctccaggtgtttttaatacctaatctgcatagatagaggaatgtcttaacgctcataaaaatatcctccccgcttgctgtccttaatcactcgtccatggctcagcgtaatttcccttttattcatgctcctgactatttcacggttatgggatacgaccattaccgtagtcccgctttcattaatctttgataagagccacatgatatcggctgcatttttatgatccagatttcccgtcggttcgtcggccagcagaagaagtggctggtttactattgctctggcaagcgctactctctgtttttccccgccggaaagctgatccggaaaatacctggccttgcgctcaagccctacccggttcaaagcgcccataacctgctctttcacctggccggaaggcgcttcactgaccatctgggcaaaggccacgttctcatagacattaaaatcctgaaacagcttaaaatcctgaaataccatgcctaaaaaccggcggtaacggtaaatctgacgggactttaactgggacagaaggatcccgttgaccgtaatctctcccctgtcggttccgtttccttaaggattaaatccagaagcgtggttttccccgcgccgctgtctcccaaaagaaaggcgaactctcccttttcaatctccagattcactctgtccagagctttctgcccgttcctgtatacttttgtaacctgcttaaatgatataatattgtcgctcatgtatactccgttaatgccgttgcccggcgtctgtttcgcttatgtcgttttgttcttattctttaaattatatacgaaagcaagaactcccgccactgtctggtaaaattcttccggtatttccatatccagctccgcattttcatacagtcccctggcaagagggcggttttccattatggcaacaccgtttgcttcaccgatttcaattattttaagagcgatcctgtcagcgcccttcgccactacccggggcgcacgatcctcatccggatgataggaaagcgctactgcatagtgggtcgggttcctgacgatcacgtcggcatccggcaccttctgcatcatccggcgcgatgccatggcccgctgtttctggcggatcatccccttaatctggggatctccctctgtctgcttatactcttccttcacgtcctgcttgctcattttcatgtctttttcatattcccaccactggtacagataatcgaagacagcaatgaggacaaaaattgcccccactgtgttaaccatggacgtcagcgcagaccccagataatgaaaggcccccatgaccgaaccgtccatcaggcgggcgaattcatggagccttgtcttcagcacatcgaaaatgatccaggttaagatggaaactttcagaagcgctttcagcagatccactacagaacggacggaaaacatccgtttaaaaccgctgagggggttcagcttactggctttgaacttaaccgcctccatggaaaacagcagtctggtctgtgccgccgtagcaatcactgccgccagaatgctgatggccgcaattggaagtacggtctctatgaataaaatcattccttttgaaagcatttccccgacattttcagcatttaccggataggcggaggcggcaagagaaaaaaacaggccgattccgtttctgatgctgcggtacataaaaggagccaggtatttcagcccattaaaaagaaccaggagagataccaccgcaacaatatcctggctctgaaaaatatgccccttcttccgttcgtctctccttcgttttggagtggctttctctgtcttttcgtcagcagccaagccctatcccccctctcccggatgtgagcatccgtcaaaacagcgtgagtaccttctgcatttcatccatcaggctcaccacataccgatcgataaattcccccattggctgggcaaacagaatcatcagcagtatgccggccatgattttcgtctgaagattgattacaaatacatgaatctggggaatcagcttcatcagtatccccatggcagcttccacaacgaactccgcagccgcaaagggcagagccagcttcgccgcaaggataaatgcggaatgaaacagtgtaagaagataagaggcgactctgggtaacagaaaactgtatgcccccacgggaaccgcctcatatgaataggcgaacaggcggatcatcagcagatggctgccggttgcaaaaaaatagagtacaaacagcatattcagcatctgtccccagacggacgcctgaacactgctcaccggatccatcacctttgccatagacaggccgaatacggtatccatcagatcgcctgccacataaagcatatagtaatagatctggaataccattcccatcagcagacctaatccaagctcccttatcattgccagaacgaaatccaggggaccgagcgaggacaccgcactgccgtcctgcagcggcgcaagaagaagactgactgaaaagaccagtcctgctctggccatcatcggtacatttttcctggaaaatacaggattcataaaaagcagcgcacccattctaacaaaaacaagaagaaatacatccaaatagccaagcagcgtatccatcgatatcctccctagctacagtctggtcataatagagaagatatgctgaacaaattccgtaaatacgctcagcatccaggagcctgtaaccagaagaacaatggcgatcacgatgagttttggcacaaaggtcagggtttgttcatgtatctgggtggctgcctgaaaaattgccacgatcagcccaaccacaatgcttacaatcaaaagcgggccggccatttgaaaagccaccagcattgcctgttttaatacttccattacctctgaggttgtcatctcgcttctccttacctgtttattataactattctgttcccggggttagcggaatccctgcaccagtgtctttattaccagatcccatccgtccaccaggacaaacagcatcaatttaaagggcagggctatcatcgtaggaggcagcattaccatacccatagacatcagggtgctggctaccaccagatcgataatcagaaacggaaggaaaattaaaaaccccatcgtaaacgcccggttcagctcactcagtataaaagacggcacaatcaccgtaagtcccaggcccatataccgctccggcccttccgtgttccccagctccccgggatccgttttggaaatctgcataaagagatccaggctctttttctccgtctgtttcagcataaattccttcaccgggacctgagccttgtcaaacgcttcctcccgggtgatcgcgccatcccggtacggctgataggcatccgcattcaccttcgcaatcacaggactcataataaataaagtaagaattaatgccaggcctactaaaatctgattgggcggagactgctgcgtacccagggcatttcgcaaaaacgacaatacaatgataattcttgtaaaactcgtcatcatgataataaaagaggggacaacggccaggaataagaacagaaacagaacatccagagaatccagggaatttcccccattgccgtcatcataaagaatcgtaaaaccgccggcgtaggaaatcttataaaacattaaaacaaaagccgccgtcaggattataagcccggcagccgccagcgcggtttttttcagtttttgctgctcagcttggctttccatcatctctcgtctctcctgcctcttccctgtccgtctttctcaccggacatccgttcccggagctgtcccgcaaaaacggacgaaaatgaggtgctctgtgtgtttttcgggggttcataggattccagatcgcagatcttttgtattcccgcaggagatactcccagaaccatcactgttccctgtatttccacaataagaaggaaactgtccctggcaatgactgtccgctccaatacacggattccgcctgagtcctgtttccttcccatcccgttacccaccagttttgtcgtataatatgccaggcataaaatggcaatcagtacgataaagtatagaaccagttttaatgctgtcatatctattccttcttaccaataatctcagtaattcttgcggcaaaattatcgccggatactaatacgtcgcctctcccaatcagaacgccgttgaccacaatgtcggccggggcccccgcctgtttatcaagggtcagcacctggccttctttcatattcaggacatcctttaccttgcagaccgagcgtccaatctgaattgatatatcaagggaaatatcacgaagcctctttctctcttcgccgatatcctgtatctcattctccgcgtcctccacggtaaattccgggaatgcaacggttctcaccgctatcggcctcttcttcgaagtctcgataacctccggcgccgtatcatcctgattccagttctccatcggaaataaaagactgtctgtggttataagataaaattccgtcttcagcacatcttctatctcaagtccgtatttggcgtacagcagaataccgtcattccagttttttaccttctgttcaatatcacgggcgctctcagacatctcaatattctgtatcgtccctgttgtcttaatattcaacagagaccccacctcgttatcttctatgcggatacactgggacattacctcacggaaggtgctgactgccacctcgtccagcggattttcagcctctgcatcaaaccccataataaaattagtcagcctgctgaccgtatcctttttgaatatgtagagattgcgtacctgcttcgtgccgtgaacgcggttttcctccaccaataccgtgcctcgcagataatcctgttcaatccccgccggtatcatggggcgcacctctctgcactcgattcgggactttctgcctaataactgttttaactgctcccccatcatcagggtaatcgcattcatcatctcaagtgccgtgcttttatcaatttcaggcatacttaccgtccccctgtatcgttttataatgtcttactgatttgaatcgctttcctgagctttgtatgcccaatcttcgcctgaaagcattcctgatcctccacataaacatcaatgtcactatggatcctctttgtcaagggaatgacatcgcctgtctggagctgaagaatatcctgggcatccaattcaaactcatgaaggactgctttaacctctacctccgaatccagcagatgctgtgtgatcgaaccccggcgcaccagattcttctccaaatcctgctttctgctgcccatggcaaatttatagccgaatttagatgtcagctcctccacattcgaggccggcatcaccaggtgaagccgggcggaaagactgttcacactcacttcaacctgaacaataacggagacgtcctccggcgcgcttatctgcagcagatgggggttcgtttccagccccgtaagcgtggcctgcatttcaatataaccattccaggcatcatcaattaatcctgtcatcttcttcagaacaaattccaggattgccttttcaatatccgtaaaatcacgctgcagctcatactcggtgccggggcctcccagaagccgctccacgataaaaaagcccaatgcaggctccatctccagaatcagaggcgcttcattgtaatctttattttccggcatcaggcttataatcccgaatagggactgatcttctatcacgcttgcatattcctgataccgtttttcttctatgttgacaatcgttacctcacagtaagcctgcaaaagcgcggtcagatacgtagcaagagaccgtgaaaatccgtcgtacagattttccacggtactcatccgctcttttgtgaactttttgggagatttgaaatcgtaagatttaaccactgtttttttccccttcctgctctgtatttattgcgcctggtacgtcaaagggggataccggattaaacagctccgcatcatcatctgccatatccgtaatctggaaatcttttcccaggataatcatatcgacacggcggttctgctctcgtccttctttcgtgctgttgtctgcgataggataatattttccatatcctctggtgatcagctttctcggatcaactttaacctggtcttccagataaatagccacattggccgcacgctcggacgacaggattctgtcgttcaccagggagcctgcagattctgcggtgtggccgttgatgtatactgcgctgatctcatcgtcgtcatcccgcagcagcgttcctatgtaattgagggcatcccggctgttatccagcagcaccgaactgtccggtccaaacaggagatcattcttaaaacggatgtaaatgtaattctccttactcgtcacattgacctgaatgtcctgatcctccatatattgttgtatgctggccgccatgctctgcatctgggtaagcggctggtccgtctcaaatccgttcgggaccgagtcctcaccgatggcagggaacttcagatccgaaggcacttcctccagcttgatattcgtctccagacccagttttttctgcatcgcgttggcgatctcctccagctttgtgatgttgacatttgatatgctgtagaggagaacaaagaatgtcagtaccaatgtgatcatatccgcataggtattcagccattcctgtgtattctcttctccccgttcttttctcttcactgggacttcctcttttccgtgcgctttatcctgaatttgttgttatttccctatatccagagctttcatcgccatgctctttgcgatgttgagcgccgtgacattcgcctcataggcgcgcgtagccgccatcagatccaccatctcctccgcgctgttgacattgggcagcatcacatagccgtcctcgtcggcatccggatgggacggatcataaacaggaacaaaaggctcctcgctggctactacctcttccgcgatcacgcctccgccgccggaggttgaaagcgccctgccgagttcgctcttaaaatccatctgacgttccctaaggactacctgtttcctgcggtatggcccgccgtcctccgtccttgtggttctctgatttgcaatattctgcaaaatgatatctgttctgaaacgctccgcagtcagcgcagagccggtaatattcagtgaatctaaaaaggccatagccatcctccccggacttaataaaccgcatacgcagtttctgtgttattttcccgtattatttatcacatagcgcagcgtggaaaaccggccggaaatgcggtttgtcagtgcagaatactgcacgtaatccttccacatctccagttcttccgcctccacctggacattgttgccgtccggccgcgcttccgtcgtgttatcctgggaaatcacaggtttgtactccgtcactgccctgccgtcttcggccgattcgcgaagaacctttttaaagtccagcttctttgctttgaatccgggcgtctctacattggcgatgttatgactgtgaacctgctgttccatccaagtctgatccagcgcattcccaagcgcccggatcgacggatcttcaaatagagccatgatttaacctcttgcctttacattcctttgccgctctgtgacattcgcacctgcttgtcggcctggacaaatgcgtcttttaattcctctaccatgggcagaatctcattaatctgctccgcgtcgttatttatattagcctgcacgatggaatagctgaaatactcatagagtgacgaaagtcccttcgacacttcatactgggtatccagtgtcgtattcagatgggttataatcgccctcgccctcttcagattctcatttcttcctgctatatccttctcttcgatgcagattaccgccttattcagccgggagatgatctcactgtaaagcagcttgagcatgtctccctgcgtcatcgtcatcactgactgttctttatattttgcgtatgggttttgcatactgactgacctccgttatgtaaactagccttccctgtattgtgttaggagaactgctgggtgagccaggagctctggctgttcatattggaaattgctttttccatctcggtaaactgcttccagtaacgtgttctctcattattatacttcgtgttaagcttggaaagcgtttccgaaatccccttcagttcgtaatacagagagttgctggtttccatgacatccttggcgcctgcataccttaccagggaacccgggctgccgctgctggcatttgccgtctccttcatcaccttctgaagctgaaccgcaatgccgttatccttatcggtaaacatctgctggatcttttccagattagtggacagtgcgctcttaagcttgctctcatcaagaatcagcttaccgttatccttataattgctggatgcttcaattccgatatcgtagagagcgagacctgcgctgcccaccttctgatacatggcgctgcgcatatcctgtaaaaattttgagatgttggagtcataacggagcaggccttccttggccttttcctcccatttttcaatttccttttcgctcatttctttcttctgggcgtcagtcaggggaggatacttctggaaatttgccttcgcattaacctgctcattcagctcttcaataagggcgttatagtcgtctacaaaaccttttaaaccttctactattttatcagtatctttagaggtagtcaagctaattggggcgtctgcggcgctcgtaactgcctttaattcaatggtaattccatccaattcaaagctgttggtgttccgctcgatcgtgttgccgttcactacaatctgagcattctgtcccttttgtaattcctttatctccgcatgagccgggtctcccttgaactggttgaacacgatttcatcattcgcgaacagtgccttcagtacgtcctttcccgctccctccgatgtgatggatatcggctgggtaatacctgaaatttccagttcccccgtatcattattaaattctgccgtgaccggattcccgccgttttgagccgtcagctcctgtttcagccggtcagccaaatcctgtatcgtcatgttaccgtttaccgcaatctgagtgcttccaaccttgattgtggctcccgcatccataaagttctgtttctcaatcagcatgcccagccgggtgccggcagttacctgcatctgtgtctggccttctttaaatccaagctgtcccgtgaacgttccttctatattctttttactaaaactcacctgatatccggcctttgaaacaagttcaaattggctgtgatccgcatcgacggccgtcagcttcacctcaacctgattgtcaccggaatcgtctttcccaaatgtcgctgccagtgactcattcagtgcggctgcatattcgccggggctggtatatcctccctccttgacgggaacgcgtaccgagtaatccctgccgttaatattgagcgataccatggaatcctgggtcttaatgccgtctaatgctgcctggaacaggctgttttcaatcgtgtcaccgattatggtatccgtatttctaaggcccttaccggttcccagcacaccgtctgttccatccttggttccgcttgccagaccaaacatcgcagtcatcagattccccttggactgggtgatcgtgatccccgaaatgtcacctgtgttcgctgattccagaacaaatttatcatcaattgatgaatatgtcagacgaactcccgcatcactgttattaatccggttaataatatctcccaccgtatcttccgatgacgccttaatctccgtaccgttaatctcaaatataaattcccgcccctgaagagcagtgttaaacggagaattagagagactggtattataattcagcttgttggtgcatccgcttgaaaatcccattttgctcaggactttatccgtcaccacgcccgaattatcccctaatgccgaatcctgcaggataatttgatgcgtggtttttttcccgcctgcttcatcgttaaatttaaatgttaaaacatccgcaccggacgacgactgtatatcggtctgaacggtaccgccaaacactttttgaaggcccgcatttatattattcttcagctctgaagcgttggctgcgcctttaaatttgattgtcttttttactccgtcgagtgacaaatcaaaagcgtactccttatctgcgtcattaaatgcgcttacgtcgatatttccctccaattgatttgaaagtgtatgtccgtctattgtcgcccccttatatgcctgggccagacggctgactctgtcaatcaccacactgggagacgcggttgactttgcagaaaccacttttaccgcaccggaggaactggtaccggtcattacattataaaaactgctgctgagcaggtttgtattgtttgtgccaaaaaaagaaaaatacttgtcgctgaagctgttgatcttggtaattacatcccggtatatttcctgtttccattcaatctgctgcttttttgcattctgcttgtcaatcttagcctgtgtgccggacaacagtttatctaccatatcctccgtgtccaggcccgatgccagaccgggcataaaattagatgaaccgtttggcccgatgctgcctgttgatgccataattatctcccctttatatgcgaaaagccgaaacggcagttaacgttttttatcgtaaagcacccctttggctgcctgaactcccatactgttcatatatccggtaaatctggagttgttcttgttctgtttaatgcgttctttcagaacgctcatcattgattccatattctttctgatctgcggttccatatccctgatgcgtgtaataattccaaacagctcctggccggcctcgaatatttctctttctcctggctgaagctccgaataattgcattggttctttgacgccttcagtataaccgaacccactctgctccggcctgccgcctcgcgtactttcatatccagatcgtcaatctgttctttcaagctctcccgtttagaaacgcactctatcatccggtcaatatcttccggagagtccgtcatcatctgctccgttaccgattcaaagcatttgaacagccttgccttttcttttaagagtccggctacctcttgttcaatctctgtctcaatccccatctggttcctccgtattctcctccgtctggtttgcggcatagagatttcgtgtgagctggaataccttcaggagatccactttatcggcggcttccttattattttctaccgtgaggtaaagctcggtccgggtgatcttcatattttccggcgcactgatcccaatacgcaccttatcccccttaacctctgtgataaaaatctcaatctcatctccgattttgaccgactcacctttttttctcgttaagatcagcataccgattcctcactctccggaccgaatacgggcatgcgaatcggataatcctggtccagaatcacctgcatggccagattcgtcttgtgattaatgataacaggacttttcatattgactgtcgactggcggaacgtctccccaatcacggcaatcacccagcagtccaaatcgtcctttggagatgcctgcagtgtgatcagtacatcctgcatgacaacaggcgcataatccctgcacacctgaagcggattcataaggataaaacaaaccgacttctgctcaattgactgcagccagcaaattccgtttcccatattagaatccgtaaccagcacatattgggtatactcctcaaacccatagatgggctgtttaaatgtaataatattattatccttaatctcaacgattccaaaatcccgcgtctctatgttcatacattcttccttccatccgaacttattccggtaacgatgccgggcttattctagcgctccctctcatagccgggtgcggcgctcggcggaacatacattggttctcccatatattcgatctccaccttcggatactgctccacattgattgacagttctcccggtacatagtttgtcattgcattcttaatatctgcttcaaactcgatactggaaggggtatagtccatatccagtttccccggcttccagcttatatccggcggtgggagcggcacagcctccagattggtgcgggactgcatctgggacgtcatctgcatataaataatatccgggatattggcccctttctgtatctgggccatctgattccccacctgcacataacgggccgtggcctcctgagccgccgcttttcccttatcagcctggtatgccagaaagtcctggctggtacggcgtccgagactttgccgctgctcataagtgtcaatatttacttttatattctgggagtgcatctgaatgcttcccggtgtctgctccatatttacatgcggcgtcggaagctgtgcttccagtctcgcccgctgagacgtcatcgataatttaatcggagttgacgttatttttaatacgttcatcataataacacctctttacttgatcattatctcataaaatcaaaaatagacgccggtatgatgttgctgccaagctgtaaggttaccatccatgccatctcataattcttattttcagttgcttcctgctcaagcttcacgccttccaggttctgctggctttccttcaggttaatctggttagtctccagccgatcctttgtcctttcaagcagcttttcccttgttccaatctccgtgatcgaattggaaatgctccccgccttatctttcaaaagttctgccgtggctatcgctccgtccttatcacctgccctcagctgtgtttcgagctgatccataaggctgtatacattattgggattgccttttccgtctgttccatatcccagtacatcaactccggaggtcgaaatcttaattcccgtttttgcccctgtacccgtctggccgttgatcccaaacccgatatccagatagacatcctcattatttttaaaatctccggctgatgccgctgtgtctaccggcgttccgttgaacaaaagctttccatccgcagagagcgaaaacggcgcttcattgccggagccggaaaacaaaaatttattggcataggttgcattcatagtctggagcatttcattcttttgtccgttgatctgctctgccagaatttcaaaatccttctgttcctttggtccgcccgcactggtcgccgtctcgtaagcagaagtggcgatggactgtataaccataatattgccctccgcagatgacagttctcctgcggcgttgtcaatggttctgatatgctcctcggtctttgcaagctgatctctgattacaaaagcgcgggccgccgccgaggtatcctcagaaacatggttaaatgatcgctccgaagccagacgcatatttgaagcggccagattgcttatattgcgctgcaggttcgtattataatttgccagcagcatattatccgtgattctcataaaagcttccccttcctaatccgattatcttcccaccagtcccacattgttgatgagaatatccagttgttcgtccatcgtagtcatcaatctccccaaagcctgatatgccttgttgaaagacatcatattgaccccctcctcattaagggacacgccggactgggacatcctgtccgtatccacactgttggcagtcgacacacaggatttaagccttgcttcgttcgtactgatctgcgttccgagcgtagtcgtgacatgggttacgtattcataaaagctgccgttgaattctcccatctgcagatcctgatcgagtaatttcttcatgtttaatatattgtcggttgccatctgtccgttcggattatttttctctatcagataagaggcgtcattggcccacatatcactgattgaaatattccccgccgtcacattgccttcctcatccccctgaagaagcattttgtaggcatcgggagtctgcggactgcctgcctggtaggtatccggtataatccggttaaaaacctctgccagtttcgatgccatcgcatccagcttgtgctgatagtatgggattcctttattcaaactgctgtcaccggtaagggcttcactgtagctgcgcagcgccccggtgggaagtgccactgttttgttatcccggttccaatgcatgctcacaccgtcatcaccaagctttattgaatcattccagaaattattattttcagaatctacaactgtctgcccattaaacttaacttgtatgcttccgtcacttttatttgtgaccttaacctcaccgtaacgtgcaagctcgtcgagtatgacatttcgctgatccatcaagtcatttggcccgtaggtaacgccgtcatagtcggtgttcaaaaatatttcatgggtgattgtcctgtttaggtcggtaagctgggccagcttcgtgttaatgtcattgactgatacgctgagatcatagatctggttctccatgattccctttagttttgtatcatactcgtttaaaacttgtgtcaggcccatgaaggagttcattacgatattggcatgtgtctcatcctgaggatttccgctgaaatcagatatcgcctgcgataaagttttcagtgcattttgtatgccgctgccatccacctccggatcactgatagccgcctggatttcatccagaattaccgcgctttgatcgtagtatcctacatcaccgtattccagacggaatttactgtccaggaaggaatctcttatctgggccacgcctctcatatccacaccctgtccggccagaggaatcgaacttcctgcaaaccggtcatttccgtatgcctgaaccgtcaccgtatcgagccgctgtctcgtatacccctttgtttttacattcgatacattattagcaataatatcgagggctttctgctgtaccatcagtccccgtttagttgtttccaaccccataaatgtcggtctcaatcgaaccacgctcctatcttatcagggctttgcgcctctgccctcgtctgctaaattttcttctcaaagatgttcctccgggaagcaggccccggtttgtagactccgctctctcccgtaaggccggaggttttcactcccatcctcaaaagctccgtctgagccatctttactgccttctggttaataaatttcacattatccactgcttcagcgaggcggccgtagaggttgacaagtgtcttccgctcctccccttccgtacgttccatcaaatccttaaacgtacacccggccagtcccagcgattccatcagctcccggcgccttttctccatgttttccagctgcttatcggcagcctgctgcatcacgatggtctcttcaatctgctttaattcctttgaagccaggcagtccagcttttcctgctgtttttcttccagctgttcgaaaaattctgtatattcttttaaaaacttaattaaactttccaagttattccctcttccatttccgaaacctgatactgaattttaccgttttcccgtctgttacaggcctgacatcaggcgccttgcaatcagttctgccgatacctgataactgccgtcctgcacctgctgctttatctgggcaagccgtttgggccctgctcctgcgtccatggatttatgaatcgaggacgaaagcttggcagcctcctgctttttcatcgcttcgctgctgatatggatttcatcattcctgaccctgctgtccgcatgtgctaagacagagccccccttttccgttccctttaccgcagccattgtgcttttgtatgcagataaattcctggttacttttacatccattttcgtcaccctttcccaaaaattcagtctatattttgccggcctgagagctgacggcaggctgataacattcatcttctagtaatgttatcgtatcttttgccaaaaactttagcagttgcaatctattatttattttattcttgattttttttgtccgtactcggcattcttgtattactcctgcatatccattttcctgcattgtatattgtcggtattcttgatataatgggcattagaaaaaagtcgaattttaccgattaagggggtaactataatggcaaagaccatcgtcctttccaaccagaaaggcggcgtaggcaaaacaacgacggccaatgctctggcagtgggttttaaatcgcgggggttcagtgtactcgctgtggatatggatccgcagggaaacctctccttcagcctcggggctgacgcagaaagcagtgcaaccatttatgatgtgctgaaaggagaattgaaaaccagatttgcgattcaaaaagctccccttgtagataccatctcatccaatattctgctcagcagtattgagctggaatttaccggtgtccaaagggagtttcttcttaaaaatgcactggctccgatccagtcatcatatgattacatcttcatcgactcgcctcccgcgctgggtatcctgaccgtcaacgcatttgcggcggcggattatgtgcttgttccgatgctttccgatattttcagccttcagggaattacccagttagctgaaaccattgaacgggttaaaaattactgcaatcctgccatccaggtactcggtatcttcctgaccaaacacaatccgaggacacgcttcagcaaagaagtaaaaggaaccgtggatatgattgccgaggatctgcacatccctgctctggatacctatatcagggaaagtgtttccctccgggaagcccagtcactccagcagtccattctcgaatatgctccaaaaagcaatgccgtaattgattacgagagcctgatcgatgaattgataaggagggggttatagtcatggctaaaagcagagctgaaattgataaagagataatgtaccggaaaattatgccgagtgcagcaagaagcggaggggcagtgacatccgccgatcccggcagtaccgctgcggcagcggcgccctcatcggaaataccatccccgttttctgctcccggccggaaaaccgccggcctgcagcttccggaatcccaggatatgattctggtaaacctgatggaggatttggtcctgtcgcgtctggatgcaactctgatgcggtttaactgctgtaaatgcaataaatgtaaaaaggatatcgccgccattgccctgaataaactgactccaaaatacgccgttataagccgcggcgatgaagttaagaaaacagagactgaaaatcagtatggtaccgaagtaaccggtgcgctggttcaggccatcatgctggtaaaaaaagaacccagacattaaacggatcactcgcaaaagggccgtggaataactccacagccctttttgtttgatgatgaaaaatacgcagagcgtgctttttatcatccgatattttactgtaataactgtaatactgactgaggctgctgatttgcctgtgccagcattgcctgagcagactgctgaagaacgctgttcttcgtaaatgtcatcatctctttcgccatatctacgtctctgatacgggattctgccgccgtgatgttctctgtcgttacaccaaggttgttgatcgtatgctccagacggttctgcagagcgcctaactgtccacgctgtgtggatacggtgttgattgctgtcttgattgtagccattgcgccctgtgcattggcaagggaatcaacagttacgccgcgtacttttaaattagctgctttcatgtttgttatagctaagttcaactggttaaatccatcgttggtatcaccaatctgaagagtaaggctatggattgcattaccgtttgcatctgtctgagctgctccgaatgtggcagccgtacctgtttggttagcagcatcggcagtgtagttgatcgtctggccttccagcttaatggatgataagccttcagctacggctccgctcagggaaccgtcgtcaatccccttctgtaccgcattcttaatggcgtcctcgatatcctttgccgtgtaggaggatgcgtttgtcttggaaccgagtgtgacagagacattgccgcccgtgagatcaaccgaaatagttcctcccactttagcaacatcatttgtgattgtaatcgtctttcctgctgctcctgcgccgacacttgcatgaagactggttccggttgttccgactcctacgtcaattgagcttgcattattgagactgccgtccagaagcttaataccattgaaatttgtactgtctgcaatacggtcaatctcgtcgtttaatgcattgaactcatcctggattgccagacggtctaccggatcatcatacgttccgttagatgccttggtagccagctcggtcatacggttcaacatggaatgaacttcctgtaagccgccctctgccgtctgaatcagggagattgcatcgttggcgttatcggttgccgtctccagacctttgatctgggctctcatcttctcggagattgcaagacctgctgcatcatcgccggcgcggttgatcttgtaaccggaagataatttctctaacgatttggaaatattgttgttgttgattcccagctgtctctgggagttgagtgccataatgttgtgctgaatcctcataatattacctccatgtaataaatttccggacttccctgtcctttttattcggttttgtctgccaaacgggccctgtctggcagggagaccggtaagaacataccatccttaccgtcctactttaaatatcgatcgtttcacagaagtctttaccgtgaaattgcacaacattatacttatatttttgtctatatttacccttttttggacacatttatccgtagaggctctcctcgatataatattcttccagggatatccccttctccgtcatatacctggccacctccacgcctacataccggaagtgccacggctcgtaattgatcccggtaatttcttctttgcctctgtcataccggagaatgaatccatattcagcgcagtgttcccgcagccactttccctcccttgtattttcgaatccctcttcaagtttttggtacgattgggaatagatatccacggcaaggcccaggcagtgttcgccggaaccaggaatagaaagaacatgccgtgcttctttatatgcgttttccatcgtatagccccgtttaacgagtgttttaaccttccggttaaatagaatctcctgacggtccagtgtcctgtatgccgaacaaatgatggggtgcaggccctcttctttcatatccgacagcatcagaaccgttgcatcgtaaatccgggaatccaccgactgtccggttcccggcagcgctttcagctctaccgcataatcttccggaattgggtattctgcattggtcagaatcagggcccacatatccttgctctcaagcggaggcccccccgctgccgcattatcttctgccgtctttggctgcaccgttttttttgattctgttaccgtttttcctttttctgcctgattttccgcctgtgtttcaattgatgcctccggccgcgtctccgttaacgccacatctgtactgcctgcgctttgtactttattcatctccgccttagcgcctatatacataaacacgaggatcagaagaaatgtataaatcatcattctcctgctcctcaccacaaatccgtccagggaagtttttttacgcaatttcgttcctcccgctctccttgtaaaactaccttatccgtctcaactgatcgttctgccgcttcagaatatacttgtaaagcaaatcctcctgaaggttggtcatatccataaactcgcagccatagccaatcagactgtccgccctgggcacacggcgccggataatacagttgtagatcatggaatcccgcatttcttcgatgacaatatcaaagccgtccccaattgccagctccagacctgacttgaacatcaggcccccaaggctgatatccacgagctgtacattctggttcaggtattccgtttccgccgtatttccattttcatccacatacttgtggctcagacgcagtatcacggccctgctccgcgaactgatacggaaatactgccttctctcatcattggtcgcttcggtcagattgataatccgggcaatcttgctggtggagagatatacgtttccaaccagcacgcggaatcccagctttgtattataaatttccacctttaccaccatattgtaggggatttccggcagctcattcctggagctgttgatatcaatataagtatctttgatcttatgtaacgttcccatggtgagaagatcattgctggtcgattttatcacacatgaagaaccgatatactcatccggtattatgaccatactcctgcctccttacctgtccggcgctttttttccctgtctggagagatttcggcttctgagaagattcctccccctctcctcctcttcggaccgtgacagggcttcttcgttcttaatccgggccgaggcttccaatagcctgcaatagatagcggcaaccacctcatagagatccaccggaatattgcttcccacttccagcatgcataagagggaggctgcgctgtcgtccttgaacacgggaatcccctttttttcggcaatatcgattatcttctccgctacggtcccatatccggaggcgattaccaccggggatgtatcctcttccacattatatttaagcgctacggctttatttttcctagattttgacatcgacaccagtccttttatacggtaatgttttaaacacgtccatcaaagaacggtttttatccagcttatccaccttcagttccgtaatccggtatcctttttcctgtatcagccgggaaaattcaggcgccattgcggaaaatactccggcataatcgccggggcagaacaaatagaaggaaatctcctttccgtcagccataaattcggcttcgaactgtccgatcccgctgatatcaaaggtcacaagcacatggacatggctgtttccgtccttctctcctttgtagtttttggaaccgctgtcgttcgggtcaatccaaagctcggaaaatgcattcagtccctgaaattcaaccggaatgacaaaatgcagcagcggcgtatagttacagggagatgacagaaggctcacaataattttttcaatcttgtctccgtttaagctggccatatcagattcgcgatcctgttttccgatgatatcggccaggatatccatgatccgggaacggttttcaacgctgtccccagtccggaagccttccatatattcaaataccatctgtctgaactgatccttgctctctctcccattaatatgaatcagaacattcagcagcgcttcctgaaagaaggattcgttatcctggaaccgtgacagattataaatgatgataggaaccaccctggctatctgcgggctgtaaagtatgctgctttccatatcttttaataattccaggatcttttcttttaactgctgaaaagaggctgaactgtccggcccgcgcagttcgtttaaaatgacatcgatgcgttccgacagacggctgcttccggctagctgttccctcaggtattccaggctgttggccgccgaatccatcacatcctgtcttgcgattgtgccgttgatcgatttcagaaggtctgcgacctctttcgacatgttcggattttccgataaaagtccccttaatgtttcaaataaaggacctttgaaaagtgtggaggcatattcctgttttaacagctcctccacaatctgatccggctttatcaggagtgactgaaacaactgacggatttccttagtcactgttttattatttacgggcaggaggttgataatttcctccagcatataaatattttttaagtagttgactgtgacatccggatcctttaacaggttcatcagtacggcggaccctgtctccttctgaaaaatgttatgctgtcccagaagaccgctgctttccggatttttagcaatatgactgatttcctggagatcaaaggggatcgacggatcggcaaccggcttgtttgattccacaacatttttacttagaacaggcgatgtcaccttcagtatatctgccattaacgcaatcctctcttaatctgtccgtctgcataataataactgcaattttcttcttttctggaaataaccaaacggctgtctccgatggagataatcgtgcctccatatatttctctggcagccagcctggactttttaacttccttcagttgtgccgtcagcttctgcatctgatcttttaattttttctgcttcatggtgctgaccggcagccagattttcagctcattcaatttctcattctgttttggagaaatactccccgccttctgccggttgttcaagtatgctatattttttttgcactcctcaagctgtgccgtaatctctgcaatttcctttttaagcgcttccacttcttccagaagctgcggtgtcacgcccagcgtcacaagagtcgtgatctggctcatggctcccacggtcttcacattcatctggttatatacagaacatacgcccccgataaaagccgcccgtctgccggtcagggtcaggttatttccgcatgacacatccgaattgataatatactctgcctggatatctcctttggcataaatgcggcagtcttccagaaacttagccgtaatatctcccccggcctcaagaatcccggttttcattccccgcattcctttatagagtataatattccccacggccgtaagagtggctccctccacgattcccataaccgtgatatcgcctttggccctgaccgtgaatccctccagtacgtctcccttaatactgacgctcccggtgaaatcgatatttcccacggagttatccacatttccgctgatattcagaatcttttccacatggaaacggccgctcctgaaggacaggttcccctcacaggccgtaatcagtttgtctttttcctcgttatatattacatttttaccctgcggaatcggcggcatgatacccgcttttccgtacacagtgttgccgaagatatccacaccgtcctccggcggctccggcggagttagttcgcagaccacttcccccgctttcacattatggatatagttggtacttttaaaatcaatgctcccattttcttttgaggcaaacttcacctctttgcggcgcggaaaaaaatcctttattttaccgttttttccgtctacgggaggagttcccgcggcaaactcaaaaacctggttataaagctcattctcagcaatatccttcagtttatcttcatcaatcccatactcaatccccatctgctccagcaagtcttttatgtctcccagcgtaatgtcccttccgcctcctgcagggctgttcaccagaattgatgcactcattttatcctccgagattgcgatttctatctctgcatccctcggctcctgcgctgattcccgctgcgctcctccggcctccgggtccgctgtttctgcggtcatctcaggtttatccgttcccagctcctttttcttctccgcatcgttccagtcttccaccgtctcgatcagagcatccattccggctgattcctttgagccctcgaaaccaggctcttctttcaaaaatccctcatccgggtccaaatccttaagcctgaatttctttttctcttccggctcccgggatttggcagattcttcctctttatccgccgaactcttccgttttgaaaataagctgaatatcagatttttatatcccataggatccctctatcatctcggattatttaacattacatttcagaatttctttgttcttttatctcaggttattaatcatttcctcaagctgatcggccaccgttacaatcctgctgttaagctggaatcccctctgtgattctatgacgcttaccatctcaccgccaacatcggcatttgagccttccagagcgcatgcaataatcttgggactgttataattccctccgtccccgtcatactcctccggttccacttcataccactctccgctggccgctccggaacggaaccggttattgcctgcggctatgagtcctgccggattatcacaggtgaagagtcctatccgttccttcagcccctcgatatcaaggacatttgactcttcctctctcccgtttttaccttttacggtcttatattccagctcgatataatcaccgtccattcccaacacgtaatggccgtcgcctgtggtcagataatttccgtcttcggtggcggaaatctggaaggaaccgtctctggtgtaaaggggttcttcatcatcctcatttccctgtatggcaaaataggcattgcctattatcgcaaaatccaatggattatcagatggaaggagattccccgctttcgtgattgtttttacctgccccacctttgagccatgccccaccaggtgctgtccctctgctttcgtattcatctgagtcttcatcagttcgtcaaaggtaacctttgacactttaaaaccggttgtatttacatttgacaggttattcgccgtcacgtccagctccgactggaacgctttcattccggatactgccgaataaaatgcactgttcattttctattcctcccggatccttcatccgttatcatcattaaactgctgtcgttttcttccttcatcagattttcccaatctcagaaaccgttttctggttcatctgatcgataatggtaagcgcgcggctgcaggactggaatgcccgctggatctccatcgtccgcgtcatctcgtcatttaaattcacgttggactgctccagcctgccctggtaaatctcaggataactctccgtaagctgcgccgtcccggccccgaacatcccgttatcataaaccgtcagattattgtaattatcggcatccacgatgctaaacaaatccagctctccgccttcattgtcataaatcactccgttggaaccgacattaaatccgtcctcacctatctcaatcgggcccatatctcccattacataaccttttcccggcagaaccagaaaaccgtcttcatctttatcaaagttaccgtttctcgtcagatattccccattatctccccggatcacgaaaaagccgtctccgtggatagccatattatatggattatccgtttccactataattccctcttcaaaatccgtcgcttcaccggccacgatggctatcggagacccctggccgacaggcgttttggctgtccctgtctgcctcaccagctcctggtcaaaggtagttcccataagccgttttgaccggtagccgggagtcttctggtttgccatattatctgccgtaatatctaatgcccggcggttcatcagcatacctgacgccgccgtataaaatcctgaaaacatctgctcaccctctcacatattcgatcagatcctctttcagctttgtaatcgcctttgtatggatctggcagactctggattcacttatctccagaatctctgctatttccgcatattttaattcttcataataataaagtgtaataactaaacgttccttttccttcagagattcaatcgaagtagtcagagttctgcatatctccttataatacagactttcttccggcttataagaatcgttccggttctccggctccgccctcagaatcgtacccgtaatgtcttccagcatggattccagggaaatgactacagaatggttcatatactgtaaatggctctccaccttctccggaggaatatcaagataggaggcaatttcttccacatccggctctctcatattccggttcgacagactcgcataagcctcttcgatttttttattaaaattccttgccctgtgaggaacccagtcttgttttctgataaaatcaatcagtgcgcccctcaccctcatataggcataggtctcaaatttagccccttttgtcttatcataccgatccatacagtccatcagtgccagaactccctggttaatcaaatcttcttcctgggcgtaacctgacgcaatgccccgcatctgggaggctgccgaacggacgatgtagatacagctcatcgtcagctcatttcgcagctccagatcttttgttgcctggtatttttcaagggactttataaaatcctgactgctttccatcgccattcatctcttgctttccgttattctaacgcgatacttcccagcgcctgaatctgtatattattatcaatctcgctgaaagagaccaccgtcacattgggataaaactgatcgatcagttttttaaaatagattctcacaaccggagaggtaagtacgatagggattgaaaccagctctttgatctttcctatctcctcggtggagacattgataattttctgtatcgttatcggatccagcgccagataggaaccggtatccatctttttcaccgacgacatgatcatgttctcgatcttctcatccagactcagtaccttcatctgcccggcttctgagaagcggtgggaaatcgttctcttaagagcctgccgtacatattccgtcagcatatccgtatccttgacctgagtgccgtaatcggacagcgtctcgatgattgtctccatatcccgtatcggaatgccttccctcaaaagattggccagcactttctgaagactgcccaccgtgatgatggatgggatcgtatcctccaaaatggtgctgttggtctttttcagattttccagcagattgttcacttcctgacggtttaacagctcatgaagatgttcctttatgatttccgaaagatgggtgattatcaccgatgtcggatcgatcaaagtataaccggccagctccgcctggatttttttatcctcgctgatccatttggcaggaatatggaaggccggatccaccgtctctatacccgaaatatcgtcgctttcatcaccgggcgccagcgccagataatgatcggtcagaatgtcgcctcttgccacctcttcccccttcagaagaatgctgtactgattcgggttgagctgcccgctgtccttgatgcggaccgacgggatgacaaatcccatctccagagccatctgctttctaaacattacgacacggtcgataaagtttcctccgctggattcatccaccagcggtatcaggctgtagccgaattccatctctatctgttcaacattcaacagagagtagacattttctatattcttataaaaggatgcctcgctggtcacttccgtctcgatcagactgcctgcagcggcggcctcttccacgatgtttctttcttttctttgtaaatagtagcctcccccgatcataacggcggaaattgaaagaatctgcggcaccgggaaaccaggaattaacaccaggcacagaattgccgagcctgctatcataataaccttgggctgggccagaaactggctggcaacctcttcactcaaattattttccgacgcggaccgcgttactatcataccggtagccacagaaatcagcagggccggaatctgggaaacaagtccgtcaccgatggttgccgtcgtataaatctgcattatctctgagattgacccctggttattggtaaatcccacgatcaggccgccgatgaaattgatcagtgtaataatgatggagataatcgcatctcctttgacaaacttcgttgcgccgtccatagagccgaagaaatctgcttccctctgtatcttggaacgcctgctcctggcctgatcctcatcgataaggccgctgtttaagtctgcgtcaatcgccatctgcttaccgggcatcgcatccagtgtaaatcttgccgcaacctcggccacacgctcagagccttttgtaatgacaataaactgaaccaatacaatgataaggaagatgacaaaaccaattaccacatttcctctgattacaaattcaccaaacgtttttacgacctgaccggcgtctccgttgttaaaaagaatccttcttgtggaagaaatgttaagtcccagcctgaacagtgtcgtaattaaaagaatcgacgggaatatggaaaactccagagcttcccttatgtacatcgtcatacacagaataaggaatgacagcgtaatatttgtgatgaaaaagaaatccagtaaaaatgtgggcagagggataataatcaggaaaatgattccgattacacccgctgtcaccagtaaattaaatcgtttcaagacagaccaccatttcggataatattcttagtatcaataatttcgctgactttgaccccaaagttatcatcgatcacaacgacttctcccctggcaatcagctggccgttgacaataatgtcaactggagcatcggcagctttttccagttcgatcaccgttccgttattaaaattcaggacatctctcagtttgcgcttcgtctttccaatttctacacagacattgagcggaacattcataatcagtcccagatttcctttgattgcaggttccggtgcagcggctgcataacccgcgctgcctgccgcattgtaagctccgtaaccggcaccgccttttgttacgggttccggcgccatacggccattaagaaccgggacttccccactgcctgatggcgacagaactttctgaaggttctgaaagtccgctttccgttccgactccatccgctcctcatcggccgccctctttttttcaaccgcctcttcgatactttcaaacgcttcttcggagatgcactggataaattcactctcgatcatatcattgattaccagcttataggtaatcatctgaaccatgtcttccccgtcgcagcctataattttatcaagcttctgaccttcatcatatagcataagctgacaggcagatgtcttcatcccgtccccccgaccaggtaaccggcaatagaagccgccgctttttttatcatctgattcattatttcaccggcagcgctgagcgcaacatcgtcaaattcaaaatccggctccgggagatcttcattccccatcagctcatttaaaaatacctgcatatctctctgacggaatatcataacaatgtttcccgatgccctgtctgtgagacagaatttaacaaaaattaccggctgcaaaagggcaaatcccacttcatttgtcttctgctcctgaatttgcggggttgtcacctgaatatttgatttcagtatggatgagagagattctcccgaatgttttgcaaacaatttcataatatcatggaaaatcactacctgttcatttgtcatagcttaactcctcttatttcacttgcccttttttaattttttctctttcgcgctcttcttttccagctttttctcttccttttcttcctgttccgcctgttcatctttgacgcttaccggcaatagcttatatagcttttcttcaataaaccttgggttctcaccttcctggatggcaagcaccccctccatgacaagatttttacacagaaattcttcctcatgcctcatcttcagcttggaggcaatcgggagaaatacaatgttggcaagaaaagaaccgtatagagttgtgatcagggccacagccataccggaggcaagcacatccacatcctgcatattgccgagcatcaggatcagtcctatcagagttccaatcattccaaaagccggagcaaaggcggctcccttttcataaaaggatcggtccagtgcatggcggtcttccagctgcataagctctgtctccatcaggcttttaactttttcctgatcgaccgagtcaactaccagcatcaaactgttgtagaggaatggatcgtcaatttcagtcagcttgtcttccagggataaaagccccttcattctcgcttccgtagctaaatcgacaatctgctgaattacctgtcttgtattaaatgtctgaggcctgaatattatttttaagtgctttcctatctttttgaaggaacttccggggaatgatatcatcataacccccacggtccctcccaatgttataaataagcttggcagatcggcaaatgcctttaagtttgtatacataaaccgcatggtttcctgatcaaacatcattccgaataatacaaaccccaccgcaaaaaataaaccgagtattgataaagcgtccatcttgttatttccttttcactatctttttcgtttgtcctcatttttcatacattttatccagcagtccccgaaacgtgtttcttttaaactcaaccaccttattgacaacctgctcttttggttcccggacaagcagatgtttgccgttcgtcagcagaatggtcgtatccggattttccgtaataatttcaatcaaatcgcaattcaatacgaactgttctccgtttaattttgtcagtgtaatcatttattcacctgttaacctttctcaccgctcatccgggttttagaaatatcttcattctctttatgtaatattaactcttattatctcttcagattaaccagctcctcgagaacctgatccgataccgtaataatacgtgagttggcctgaaatcccctctgggtgacaatcatatcggaaaactcggtggaaatatctacattagacatctcaagtgccgaggaacgcagacttcctgaacctccgttgcccggctggcacgcttttgcctcaccggagttggaggaagccgtaaagtaggagtttcctatctgctcaagtccgtaagggttatcaaatgtaaccagatccacccggccaatctggaggattcccagctgtggatgcgtaatctggacaataccatccgaaagaatcgctatcgggcagtcggacagcgcctgtgcgcctccttctgttccgtctttcagggtaaaggttttatctcccagacccaggtttttagcctggtaggatgcggttgccgttcctgttttacttgccaggctctctccgtccgcaggatcatttcctgagttattatctttaaattcctttgtaattgaggaaaaacctttatggctaagctcaatactctgtccttccgtctctttcgggtggtttttaagtgagtcttccgtttcttttaagaggacagattttggagtatcgctgttcgagtaaatcctgccttcaaattctctgttattggttccgtcgcctatcgacgccttgatttcccagtaagccagatcatttcctgaagcttcatggaaggttgcgctgtaggttacatctccctttgccgtaaaaataggacttgtgctgacggtctttggtttcattccgccaaaaatctcatttccatccatggtcagggtacctggattaattccgaagtttgcctttacaatttcttcgcccgtcagcggattagcaaattcgcccatctcaggctgggaggagatcgtaaaatttccggccggatgtgcctggccgtcattggcttctgtgattgccgtattcattttatctgaaaactgctgtaatgaagtaaaatgagccttcgggttcacacggaccgtgatggaattggatgtcagctcacctgcattcactttgacatccgatccgtccggaagtgtatcgtcaagctgaaaatggaatgttacgttggctgaattaaccgcattctcggaattgataaaataatctatctcgttgattgtctctttagcctctgcctttgccgcagaaagactgggcacgcttaaatgaattttttcactggccgccgctttgcccatcgggtttcctgaaacacccagcaccgtatatccgttgctgtcaaccagattgttagagctaggatctacgtatagaacaccggctctggtgtaaaatgtatttccaaaagcatcctggacctggaaaaatccttctcccgtaatggcaagatctaagcccctgtccgtgctttgcagagcggaacggcccatattcagatcgatgccgccgagctgcacgccgtatccaacctggcttgcattcttgcctcccgtatcatttccgccgcctgttgcgctctggagtgtctgataaaatacatcctgaaatcttcctcggcctgatttaaatccataggtattaacgtttgcaatattatttcctataacatccagcttactctgatgcgctctcatacctgatactgcagaatacaatgatcgtaacatatttaattctccttctctgaaccgccccatccgtccgtcgttcgggatgggtttaagcttcctaaaggaccagctaaatcataacggttccatcaatattcgtgaaaatcgcccctttcaggctatcgtcactgactacggttactactttattattccttatatttaccacataagcggtggaatccactaaaattaacggctccttcagccccttttcttcagccagccttacgccttcattcagacgttccagattttcgctggacacatccacgtttcgttccatcacccggtttaccgcgtgcctggaaaaagagagcctgctttcctcatttattttctgctccagcatctctttgaatgaggtatccggttcttttgcctgctggccctgtttctgaatttcccagggatttccggtgcagataggcgactgtaaacgtttattatataaaaattgatccatacagttctcctttcttattcttccgggtccttaccgccgtctccgttacctgaatttcctccggattcagccggcgctgtcttgatttgcattacttcactcattttatagggtttgtcattgacgtacaccagatactcattatccacaagggatatcttatttacaattccttcctgtgtatcgagttcgccgcttaccgtcatctttgatgcgaccacattttttccaaccagtgaagaaataaaattactcttcgaattataagccatatcttccatatactgcatagtagtaaactgagcaagctgggttacatactgcgtatcgtccaccggattcataaaatcctgatttttcatctgcgcaatcatcagctgcaaaaagtcatctaccgatacattttgttcatccggatccgcaaatacggcgtcgatattctcacctgttttgcccgtccctttgtaattataattatccaccgtattggatggtttttgataatcgttacctacaggcatccttatcctcctttcctgttttttgggctgatttacttaatgaatatgaagcatgtcagatataagccggaagtcggccgtattcctgattaaggccataatttactgccgtttcagccattacttcctcttccccgctttctttccttacacgacggccatttggctgtcctggctgttctctgcggctgctttgaaaaaatccctgctcatggctcatcatatccatgccgccctggctgttatgataaatctcctggacttccgcgttaaggggagccagcgtctctttcaggtgcatcatctcacccgacaaaattttctgtgtctccagattgcttaccccaatactcagagatatctttcctcctgtcgaggccatatggacgagaatttctcccataccttcgggcttcaggcgtattgtaaactggctgagctgtttttccagtccctgttcgattcctgatcgaatctgctccggcagaggtgctgcatccgtcaccgcggtatttccggcagcctgcgttcctgcgcttcccgacaatctggctcccacaagccgttcaaaaggtaaaaacacatttttttccgcctttttctgaagctcttccagggaaacctgttcttttgtctcaccggctgctttatcttccggagttcctttggaataaatacttcgatccagggaaaaccatttcgaagagtcctgattttcctttccagaaccaaaacttccgctttcagttccttcaccgtttgcttttgccgtgttaataatgtccggcattttcccggcatccggttcccggttttccatcccctgcgcattcttaggcatccgaacactgccgtccattttgaaaacttccggttttccctccgctttcttacttgcagaagcgtcatttaaaacctcgttcattacagaaacggttccggcttctttcgcctcatttcctatagcttcagatgttttcatctcttctgcgggggacctgcctccgctcatcccggtttctacgccttttacctccccattaaagattcctcccggataaatgagtgtgttgatattttcttccccggaggagcttacgctctctgcggccgcataattttcccctgtttttatctgttcagcagaaatctctttgtccatcggctgttcccggctgttctggccgctcattatttcagcctcgtgaataccgttctgctctgccttcttaatgtctttcttttcttctttttttatctctttcttttcttctttcgtttcggcatgctttaccggttccgtctcaggcttaagttctgtttccggctttccctgggaccgttccttcaggattgacaggaagtccgcactgcctgattttacctgcctttttcccgaattgcctccggtatcgcgtaattttacaggcatagtctttactttcatgttctcaccacctttcttctttttaatttcggctatagcttacggaatgctacagcatatatttggaaacatcactgcgtaaaaaggaacctgatacgtgttccgatatcatctcttcctcttccttcttttcactacgatgatattcctctaattgcttttctttcagcttttccagttttttcacttcctgggaagcttccgtcaccgtctggcgctggcgttctatttccgcctttttaatcaaaagctgctttttaagctgttctaattgaaactttccggttcttatcatggccgtataggcgttgatttgataaaccgtcgttccccgccttatttccacatccatctctccatgtatcttttcgagctggcatataatttcctgctgtctggctgcaatttcatcgtgttctgcaataagacggcccatcactcctttttctctctcaagaatctgttcctcgtagttcatcattcttgccaatgaaaatgaaaacttcttcataatcccgtccccaattcatctatttattttattccacgagctttatcatctttatgattgtttcatccagggtaaaactttcatccgtcttctgctgaagaaactcattgatcgaatccagcttgagaagcgcctcatctaaatcccggttcgtcccctttttgtatgctccaatcgataccagatctgcgttattttcatagacagacaaaagcctcctgattttgttggcggcctctttatgttctggaaccgcgatatcattcatcagcctgctgacactgtttaatatgtcgatagccggataatggtttttagccgccacttttcttgatagaatgatatgtccgtcaatgattccccttaccgtatctgaaatcggttcattggtatcatctccctctaccagaaccgtataaatcccggttatggatccattctcaaaatttcccgctctctctaaaagtttcggtagctcggaataaatcgacggcgtatatcctcttgccaccggcggttctcccacgctcaggcctatctctctctgagccatcgcaaatctggtcagggagtccatcatcaagagaacatccatcccctgatccttaaaatactcagcgatggtggttgccgtcatcgtgcatttggaccgcatcatggccgtctgattcgaggttgccacgatcagaacggaacgtttcaatccttcctcacctaaatcgcgcttgataaattccacaacctcacggcttctctcccccaccagcgcaatgacattgacatccgcctttacattcttggctatcattcccatcagggtgcttttacctacgccgcttccggcaaaaatccccattctctggccttttcctatcgtcagcattccgtctatagccttaattcccatctggattggcgtactgatcctgggccggtccataggatttgatttttttccgttgattccatagcagatatcggcattgatcggtcccagattgtccatcggaaaaccgattggatccactgttcttccaatcagattattacttacaggaatcagtaatttatgcccggtattctttactgcactgccatacccaatcccctctatctcatcatatggcataaggagtaccttattttccttaaaacctaccacctctgcatatgccgcttcggtttcccccggtatttcaatcatgcagacatctccaatattgcagaccggaccgatagattcaatggtggtgcccactatcttgtcaattttccccaagtaattatacaggcttgtattccggagatgattctccattttttctatgtccatagaaaattccttcattccttttccatgtattcagacaggaattcttttaagtttctcaattgtaccggaatggatgcgtccaaaattccgtcttccgtttccactctcaaatcgctgtatggtatatcttccttttttatttttatctggcttttgctctgttccctgatggaatccagctttttttccaattcctccgccagcttgtaagcacggccggacagatgaatggtaatctgttttttccctttttcttctttaagaactgactccaccagactttccattgccagcggatcctcgtccaattgttttttcaggatcttttccgccatattcatcgcgatcagcaggatatcccgatttaatttttcaaacgttgcttcctgctcttttttcaatttttccagttcttcattcagtccggccagagtatcattaagataaatccggctgtttgtcatcccctcggcaaatccctcttcttctgcggctttttttaatctctcagcctctgtctcggcagtattgacaatcttatcacgctgggcatatgcctcttccagtacacgggaagctgtctgattggcctgtaagcgcgcatgctccagaatctgtttcttttcttttgaaatcagttcgtattttttccggtattcctcttccttcgaggtgtcctcatcttcatgaatttcttccatgcgtttctgctcataaaggttcacacggaaatcttccaacacggactcttctgattttataatcctagacaattatttcatcctttccatctttggaaattacgatttccccgtcctcctccagtctccggatggctccgacaatccgctgctgagcctcctccacatcgctcatacggatatttctgaggtattccatatctgtctggatactctccctcatacggtttgacatattggagaaaatggcatttgtcacttccttattggcaaccttgagcgccaccgcaatgtccttggaatcaatctccctgataaacctctgtattgacagcggatccagataggcgatatcttcaaatacaaacatcagctttctgacattttcagcaagctgcggattcttaatgttaagttcatcgaaaatatccctctccgtactcctgtccacatggttcatcacatccgctatataattgagtcctcccacttccattgtttcttccgattcagaggatccgatttttctttttaccacatcctccacaatttttatagcggcaggatacgctctgtccatattggctacccgctccaccacatcaatctgggtttcccttggtaaatttacgataattcgtgatgcctgttccggcgttgcgtaagagagaataagagccagcgtctggggatgttcgttctgaaccaccgtcattaagctcttataatcaacctttctgataaaaccaaaggatttagtcttcaatgccttggatacgcgatccatcagatttttagcctgctgctgtccaaaggctttttccaggacttcttttgcatagtccttcccaccttcagatataattttctgcgtcacgcagcaatcataaaattcctttgatatttcctgtatgtcccggtcatccagctttggaagacgggccagctcaatcgatatctgctctatctcattatcgttcagatatctgaatacttcggaagctgcttcagccccgataatactgatgacagccgccgccttctctgccgggttccttccctttttttcttcatctgacatattatttcttcgcctccttcaaccatgaactaatcatagaagctatgatttcaggatttgtcttagcaaatgcctttacctgttccgccggattctggctcttcttaatctgttcgctcaggcttattttaacagcctcttctttcctatccggctcctgttttgcagagtcaccgcgcatttcttcgtctgatcctgcaaaaccaaacagttcttcatcttcctgcgcaatctttttgcctttgcgaaccaacatgacaatcagcagaagcagcactgcgatcaggcctgcgattccataaagaaccgcgcgattgttccagattcctttcgtgccggcctgaaccggtattgcatcaggaacagacacttccggattttcaagctgtttaaagctcgtcacgactatatcctccggcgcaatattagctgcctttgatgccgcctgtattaactgctgctttttcgtttccgttaaattatcatcattcacagagatggctacggttgctttctgcagctctacattgtctttttcaatctgcctcttaatatggctgaccagataatcgacacttctgtaataatcatttcccccgttatttcctccgcctgccgcggctccgccataggtggggatatccgtattattctcttctccggcaattcctccggctcccataccggcgccgtttccggaaccctgttcctgaaagtcttttacaattccctgcccgtttgcttcgggacgatattgcaaatcttccgtaatcatcttatcgtaatcgattacaaccgttgccgaaacacggatctggtttgatttatatcccagagccagtacattctttatcttattttcaagcttttcctcaacccgggcctcaaaatcaagccggttcagcccgtaaagacttccgctccccatatccccggatatcagttcttccattgtatccgcatttataatcgtgacgttctcgggcaggagtctcggtacactgtttgccaccaggtttttaatcgctgctaccttatcaggtgaaagctcaaaagtcggaaaaaaggacagagaaacagaacctgtgctgtcggaagaggtttcctcccatacataggtactgtcatccggaacatttaaagttactatggcattctttactccattcatgtcttttaatgtccgttcaattctgtcctgtaaattcaaaagcagatattgttttttttcaaattccgttgtcgtaaaacctgtattgtccgtgaaaatatcaaaaggaagcgccgttttgggatagcccagcatcgacatgtccagcattaagtctcctatctgagactccggaaccattacctcaccctcgtcattcctcttaacttccacgtccctgctttggagtactgcgaaaacttcagcattttcttcccttgatattccgggaaacaatacttgcagattttgatttcccttatataaaaaagctgtcgccgccacaccgattaatataacggctgccgctcccacagcggcgatttttttccttgtatcaaagaaacccttcattctcttactgtccatggtttcttttattttatcttttacgtccataaattcataccgtcagatactataactatacctgcatccccattatttgattgtatgcgctcaccgctctgctggtaagctgcgtggtaaattccacggcggcggcagtctgctccgcctgaatcagagctgtatgcaggtcatcaatctgcccggcagcgagaagctgatccaattgctccccttttatctgctctttctctgccgtcttaatagcttcttccagaaggtttttaaaacttccttcttttatatcattctttttttcatggctttccaaaccttccaatcctttaatcggctcgaaaccagaaaccggaacaataaacataaaaacctccccctgtcatttacataatcttgtgtaaaataccaaaaaactacaaaattcttacatttttattaatcataacattcaattcggcaattgtaaatatgatttacggctgatccaattattggatccatactccgtcaccatttagataacggccgcttaccgtaacattcctcatcatcgttccgtctgtgttaaaaaaataccactttccgtctaaaagcttccagccggttgtcattcttccatctgaatcaagaaaatatctgtttccgttgacctcggcccagccggttatcatggcgccgtcagttccgaacagataccactgcttattatcttccatccaccctgtcgccatatcaccattcacggtaagataatatttctttccatttttcgtctgccagccggtcagcatgtagccgtcgccgtcgaacaaataccacttatcaccgattaatgcccagtcaccggccggataggttccgtcagcgtttctgaaccaccatcctgttttatcctttttccatcctgtatcggcgggagtcatcgtttcccggccgggtgtctgattggtgtttgaaacaaaaggcgagatttcatcagcatcgacccgctgaatatccgaatagacccattcgcttgccgttacataagaaagctcctgcgaatcctttgggatggcgcgcacgcagaatttatatcttcccgcttccgtaatatagggatggaaatcataaaatgtcgtattaaccttttcgacactgtaaataatctgatcattcttaaataatttcagttcataggctcccgcagactccaccgcttcccatactgcttttccgacaggataaccttcccactgtgcatcgtccggcttttccagctttccgcttgctggacgcagtttcagtgtcagttcaatcgtttcattattgttcttctttttagccgaaccgtattccgccccatttatctgatatttgctggctcctgttattttgaaataatatcccgtcctggcatgcagctccacttttaccttggggacatcccctattttccagtaatccttctccgttgcccatttataggctccgacggtaaactgatcactgtcagccgtcaccataaccgtggcctcatcatagtcggtctcagcctcaacatttgacctcacgctgatggagacagatgtaatgggggtacgcagttcttcctttcttaccgccgcataccccggtaccgcagcaccggctgccagaactgccgcaattatcgccgttatgaatctcttttttaaccgtcgcatctcatatcctcctatggaatccatactccatccgcaccaatataatattgatccgcataggcatttctcagcatctttccattttccgggttcatataataaaacttatcttcacattttacccaaccggtcgacatagccccgtcgggtcccaggaaataccagtcatcgccgtccatcagccagccggacgccctggcaccgtccgcgctgaaataataccatttacggttttcctcaagccagcccgtaaccatatcaccgctgctcgtcagataataatcttttccgccataatgctgccagccggtcagcatatttcccgacatatcgaataagtaccattttccgtcaatcagcttccatccatttgccgcataagaaccgtcctggttccggtatttccacttattctgaaccgtattccatccaaaatcggaaggattcagattgccgggtgaatttccgtttgattccggtccgccggctgacgggttacccggagatttttcgcctgtagtctggtttttacctgcctttggcgcagtctcagcctgctgtctgctgatttcctgttcctccgattccttccattcacctgccgtcaggtatttcgcctcactgctgtctgccggaacggcccgcaccttaaaggtataaccgccctgcctgtccatatacgggtaaaaattacaatttgttccctttaccttatccttgtgatctaccatggtatttccgcggtacaattttacctcataggcttttgcatgctccgtttccgtccactttgccttgcccggagatcccgaatcccaccatgcactttccacagcccccagtgttccctccaccgcattaagctttatcgtcacctctgctgtttccagatcctcagaaattttaacagatgtacaggaagccccggacacggaaatattactcttctttaaattctttggaaaataatattcctcatccgcatcaatataaatgcgcattttcggctcttcgccggcctcccagccatcatctgaatttatgaattcatacgtattaacatgatactgtttgctgttggttctcaccgaaacgtcctggtttcctccatcttcgatatatgaatcaataaaaatcttgattttcttaattttctccctgccgtctgaatcctctgccccataagttaaagctgcggctcctaaagccagtacgaccgataaaatcaaagtttttaataaaattctgtttttcctgtcttctctcatgattatccctgatatatgtgccggcaaaaaccggattgtttacgtttcccatgggcgccgtatatctaatatggtccggtaagtgacatcattccccaccttaattccttctttggcagaactggcatgtacgattcttccgtctccgattgacataactacatgaccggcataaaataccagatctcccggctgcagatcttcaaagctgaccttcttcccgaacttagactgctccgcagaggttctggaatactgattccaaaattcttatacacagactggacaaatccggaacagtccgcaccgtttgtcaggctggttcctccccatacatatggatttcctacaaattgaagggcgaaatcggctatttcacggcctttttcggatcctccggtgctttttatccctgtacctgtctttttttgggggaccgctctgcgaagctgcctcagtttttccgtctgttcttttacggctttggcatatacctccgccttgtccccggcatcttttaatttattgtcaaaatcggccgcctcttctcttttagacttaagcgacctctccagcgcctctttttcagccaggtattccgcctccattacttccatctcggcttcttcttccctgtacctgttctccagttcctccgccctgtcccgtatctccttataattcaggagcattttccggtcatattggtataaatccatgaaatactcgttctcacagattgcatcggccatacttttagccttaagaagaatttccagatacgtgacgtctcctttttcatagacataccgaatccgttttttcatagcttcatactgggctgtctcacttttcctggctgccttgtattctgcttcagcttcctgtattttttgatttttttcaataatttcatcttccagaacatgaattgtgatcagtaaatctgatattttcccatcgatcgctgtgatctctgaaagtatcttctccttctgattctcaagatcctctatttcacggcgtacctcactgagattttgttctgaatttctcttttcttcctgtacttttccgatgggggaggcaaacgccgttcccgctaaaaaaatctgaagcatcagaaagagggacaggattctgtccgctcttttatttttcatatgatttattatccgctattcttcagagtattctttaaccgccgtctcatagagattatttcccttcgaatcaatcacgacgataaccggaaaatgctctaccctaagttccctgattgcttctgtccccaaatcgtcataagaaatgaccctggattccttgatgcattttgacaaaatagctcccgccccgccgactgccgcaaaataaacggccttatttctgacgatggcctccgtcacttctttgctccgctttccttttcctatcatggctcccattcccaaatcaagaagacggggggtatatttgtccatcctgcttgatgtagtggggcctgccgagccgatcaccctgccttctcttgccggcgaaggacccatgtaataaattaccgtatctttaatttcgacaggcagttccttcccctcgtcaagtgtttcaatcatcctcttgtgagccgcatcccttgccgtataaatgataccgtctatgtaaacataatctcctgcttttaaactctctgccgtttcttttgtgaacggcgcctgaatggtacgttccattttcattcctcctaagtttaccatccaatatatattatcggactaaattttcatttctttagctttttttcttttttttatataattctgtggatatgcctgtttacatggcaacagatattaaccgccattggaagtccggcaatatgggtcggataagtctcaatatttactgcaagagcagtcaccgttcctcccaggccccctggcccgattcccaggctgtttatttttttcagcatttctttttcaagttctctcacataaggtatcggtgattcttcctccagatcccgggttagggcatgttttgccataaccgcgcatttttcaaaggttccgccaataccgactcctattaccataggcggacaggcattgggaccagcatcctttaccgctgtcagaatggattcttttacgccttcaattccgtctgccggtttcagcataaatatccggctcatattttcacttccgaatcccttcggggcaactgttatgtcaacctgatcccctccacaatctcataatgaatgacagccggggtattatcctttgtgttgtcacggtaaatcggatctttcactacggattttctcaaatatccatcgacatagccctgtctgactccctcattaacagcttccgtcaggttccctccatcaaaatgtacttcctgccctaccttcataaaaataacagccatacctgtatcctggcaaatgggaatcatctccgcacctgctatttccagattttctttcagttgattaagaacctggcggccgagtggcgccttctctttttgaactgcctgttcaaaaacttttttcatgtcttccgaaaggaaatggtttgcctcaatgcacatttcttttacattctttgtaatctcactcacatcaacttttctcatacttaaatacctctttgttttcaaatagtttgtcttctggttttatatttatctgtctttacattaatttaatcataaagtatttcctatcttcttgcaatcctttttggctgcacaaaggccgcaggaatatggcatttcctgcggccttattttatcagcttttaattttccggcatttcttcactgtcctgttctgtctttccttcctcttccatatcatcatcgtccgtgatatcatcttccagatcttcgtcatccggattattttcactttcacgtacttttgcaatacttgcaacggcaattccggaatcaggatcaatgctcatcagttttacgccagaggtatttcttccaattatggatatatcatttaccgacatttttatgataatgccctcgttggttatcagcataatttccctgctgttgtctaccagcttggcgccaatcaaatcgcctgttttgtctataatcttataacatctcacacctttgccgccgcggttctggcagttaaactcttcaatcggagtccgcttaccgtagccgtattcggaggcaaccagcaggcattctccctggctcgacatctgcatgccgattacttcatcatcttcatcaaacttcataccgattacgcccatagatacacggccggtaactctgacgtctgtctcatggaaacggatacacattccctttttcgtcacaaggaatatatcttccgtattatcggttctcttaacctcgatcaattcgtcgttctcacggagaacaatagcctgaaggccattctttcttacattctcatactccttcagggaggtctttttcaccataccgtttctggtggccatgaacagatatttatcatcctcgaattctttcatcgctatgatggatgtaatcttttcaccaggcatcagctgaagaaggtttacaatcgctgttccccttgcagttcttcccgcctccggtatctcatatgccttcagccggtaaacacgcccggtattggtaaagaacatcacataatgatgatttgtcgtcataagcagatcttcgatataatcctcatcgattgtctgcatccccttgatacctttaccgccacggttctggctcttaaagttgtcgctggacatacgcttaatgtagccaaaatttgtcatagccactaccacgtcatcatccggtatcaaatcttctgccgacatatcatattcatcatatccgattgccgttcttctctcatctccatatttatcagaaatgacgatgatttcttctctgattacgccgagcagctttttctcgtctgccagaatagcctttaattcagcaatctttgccatcagctctctatactcattttccagcttttcgcgttccagaccggtaagagccctcagacgcatatccacgatagcctgagcctgaatctccgacagggcaaaccgctccatcaactgtgctttcgcatcggccacgttggcggacccgcggataattttgattacctcgtcgatatgatccagggcctttatgaggccttccaatatatgagcgcgctcttccgctttatttaaatcatattttgttcttctggttactacttcctcctggtgctgcaagtagtattccagcatctgttttaagttaaggatccgcggttcgttgttaacgagagccagcataatcacgccgaatgtatcctgaagctgggtgtgctttaacagcctgttcatcagtacattggcattgacatcgcggcggagctcgatacatactctcatgccttcacggttggactcatcccttaaatctgtaatgccgtcaacttttttctctttgacaagctctgcaatcttttcgatcagacgggccttattaaccatataaggaagttctgttacgacaatcctgttctttccattggccagtgtctcaatatcatatacggcgcgtacacggatttttcctcttcccgtcctgtatgcctcttcaattccggcccggccgaggatcgttgccccggtggggaaatccggcccttttacaatttcgagtatttcttccagagaagtctctcttccctcttccactctgttgtcaatgattttcacaacgccggcgattacttcgcgtaaattgtgaggcggaatgttggttgccataccgacggcaataccggaagttccgttaacaaggaggttgggataacgggacggaagcacaaccggctctttttccgtctcatcaaagttcggggcaaaatcaacggtatctttattgatgtcggccagcatctccatcgaaatcttgctgagccttgcttccgtatatcgcatggctgcggcgccgtcaccatccaccgaaccaaagtttccatgtccgtcaaccagcggatatctggtagaccatttctgggccatgtttaccaaagctccgtaaatagagctgtcgccgtgcggatggtatttacccatcgtatcaccgacgatacgggcgcatttacggtgcggcttatccggtccgttatttaattcgatcatggaaaagagtactcttctctgtaccggtttcaaaccatctcgcacatcgggcagagccctggcagcgattacactcatcgcataatcgatgtaggatgtctccatggtttttttaaggtctatatcatgaactttgtcaaatacattaggttccattctttctcctctcacaatcctgcctgaaaattaccggccgcatatgtctgctgcacagctccggctgccgttaccattcagctaagggctgaatctctgacggctatcagatatccaggttctgaacatatttggcgtttgcttctataaattcacgtcgcggttctacctggtcacccatcagtgtggcaaatgtcagatctacttcggatgctgtctcattgtctatcatgacacgcagaaggattcttctctccggatccattgttgtctcccagagctgctccgcatccatctcgccaagtcctttataacgctgaatcttattgttggtatcgcggccaatctccatcagaatggaattaagttcttcgtcgctgtatgcataccataccctcttattcttctccaccttataaagaggcggctgtgccaggtatacatgcccctgacggatcagttccggcataaagcggtataggaatgtaagaaggagggtgctgatatgggcgccgtccacatcggcatcggtcataatgataatcttattatatctcagcttctcgatgtcaaaatcttcatgaattcccgttccaaaagcggtaatcattgcgcgtatctcggcatttccatagattctgtcaagtctggctttttctacgttcagaatctttcctctcagcggaaggattgcctggttcgatttattcctggcctcttttgccgaacctccggcggaatctccctcaacgatataaatttcacagttttccgcattcttatctgaacagtctgccagttttcccggaagagccataccgtcgagaactgattttctacgggtcatctctctggcttttctggccgcatcccttgctctttttgcaagaatggacttttcacagataatctttgcaaccgacggattctgctcaaggaaataggtaagctgttcgcttacaaccgcatcaacggctgttctggcctcactgttgcccagcttctgtttggtctgtccttcaaactgcggttcctcaattttaacactgataatcgcggtaattccctcccggatatcctcgccgctgagagccggttcgttatcctttaaaagtttgttctttcttgcataatcattgaatgtcttcgtcagcgcattcttaaatccggtcagatgagtaccgccttccggcgtattgatattattgacaaaggtatatatattctctgtataggaatcattatgctgcacggcaacttccacatatacctgctccttggttccctcgcagtagatgaccggcgcatagagcttttcattgcttttgttcaaatacgttacaaactctttgataccgccctcatagtggaataccttttcttttttattatctctgtcatcacgcagcacaatccttaaattctttgtgaggaaagctgtctcccggagcctgatcttgagcgtatcataatcataaaccgtctcttcaaatatatctttatccggcaggaatgttacttttgtaccatgtttatccggagggcattcaccgtccacacggagcgggcacattactttgccccgttcatatctctgtttgtagactttaccctctttataaatctctacttccagccattcggaaagagcatttacgactgaggcgccgacaccatgcagtccgccggaaaccttgtatccccgccgccgaatttaccgccggcatgcaggatcgtaaatacaacctcaaccgcaggaataccggctttcttctgaatgtctacaggaataccgcggccgtcgtcctctaccgtgatcgaattatcctcatttatctgtacttcaatcgtatcacagaaaccggcaagcgcttcatccacggcattatcaacgatctcatacacgaggtgatggaggcctctcatggaagtacttccaatatacataccaggacgtttccttaccgcctctaacccctccaatatttgtatttgatctgcactatattctgaacccataagttcctccttaactttactcacagtcaacagttccgtttaccactttaaaggtcttatctatttgaaaacaatggcttataaaatcatccagtccggtacaggtaataaccgtctgtatatggctgatcccggaaagcagatgctcctgtcttccggaatccagctccgacagaacatcatccagcagaagaatcggataatccttaactatctttttgacgagttctatctccgccagtttcagtgatagagccgccgtcctctgctggccctgggaaccgaattttcggatgtctatattgtttacataaaaacttatatcgtcccggtgcgggccggtaagtgttgttttttgcctgagatcctgcatcctgcttttcttaagagccttttccagtacgtctgcctccgtatttggttcataacgtatctccagctcttcttttccgccggaaagattaaaatggatatcccggataatcccattcatctgatcgataaaatcattccggtaatggatcagctcacggccataggaaaccagctgcatatcgtaaatatccagcatctcctcatattccggcctgaaggcaatctcttttaataatttatttctctgcagaataatcttattatattgaacaagagaatggacatacagcctgttgagctggcataattccagatcaacaaaccggcgtcgttccgccgggccgttttttatcagatttaaatcttccggtgaaaaaaatactacattgacaacgccaaaaagctcactggctttatggattgctatcccgttgattgctacgccctttgtcttgttctttttcaggtgcatatcaatccggtaaggaacatcatcctttctgatgttcatcttaatatgggattcttcctccccgaattctataatctccctgtccttgcttccccggtgtgattttgtcgttgcgcatacatagacagattccaggatattggtttttccctgggcattgtctccataaagcacattggtccccggatcaaaattgatatgtaattctttataattacggtaattttttagttccagcgattcaataatcatgggagaagtcctttattttatgattttgatcgtagttccctcaaaggtaacttcgtctccgtcatagagtttttttcctctctggtattcgggctggccgtttaccttgacgaggccgtccagaacggcgaatttggcatccactccgttctccaccaggccggccgctttcagcgcctggcccagtttaatataatcgtctcttaatttgatcgtttccatcttattatcctttttagattgaagccgcgttgaaatttacaggaaggatcaggtatatatagttctcttcctcgtctttgataaagcagggcgacttcggattcatcatgtacagagtaacttcttcgtcatcaataatacgaagtgcgtcgaccaaaaacttcggattaaaaccaatcataagatcttttccgaattttgtaatatttatctccgcattcatcgtaccaaaggcggaattgagtttcagctccattccctcatccgtaatattgataataataggttttttatcattttcacggatcagaatgctggcgcgctctatactgtccataaattctctgcggttgaccgtaactttcgtatcgtaatcactggacagcatctggttgatcctgaaatattcgccttcgatcagacgggatacgacaaccgtatcatcaaactcgaacataatatgattggaagtaaagaaaataagtacttctgattcattgtcgccgttcagtatcttactgatctcaccaagagtcttgccaggaacaatgacttttatatcatgatattgatcttttaatataacttttctgatcgacatgcggtggccgtcgagagaaaccactttcagtatattatcattaacttcgatcaattcacctgtcatcattttgttgctgtcattcggcgatgtggagaagagcgtctgacggatgacttcttttaatgtaaattgggaaagacagatataattgtctctctctatatgcgggatataggaaaattcttctccgtccttgccctgtattttgaatacagacttttcacatgtgatgactgtattgaatttttcatcagattctattgtaatcaaagattcgtctcctgagagcttccttatgatgtcggaaagtaactttgcatcaagcgctatctttcctctctccagaatcattccctctacttttgtttctatacccagctccatatcattgccggtcagttttatctcgttggaagttgcatcgatcaggatgcattccaggattggcattgtagttttagatgatactgccttcagaacgatattgatgccgttcatcagattgtctttattaaatgaaagcttcataattgttgataactcctttgctaagattgattgtgatggttagaggtatttatatataaattccgtagcattcgtagtagggggtgtgaatttgtgtaaaagcccggacaggccctgaacacaaaggtttgtccctgtagaaatcattgtgtaaaactgccgatattaagagggataacttgaggtttatccacaacctgaaaatgaacctcagttttcgatcatttatccacacgttatcatcggtatatccacagcttattgtggatttatctttttcttcaggatctctatggtattgcgcagactttcgttcttatccatatcggcccctattttttcatatccgtgaattatagttgtatgatccctgccgcctaaatatttgccgatagcctgcaaaggcgtatctgtcatgctccggcacaggaacataacgatttggcgggggaaaaccacttctttgtttctcttctgggaagaaatatcaagcggagtgatgccgaagtgatcggctactacctgaataattaattcaggggtgacttcttttgtctcgttcggtgaaatcaggtctttgagggcttcttcggccagttcaattgtgatttcctgtttatttaatttggaaagagcgacgatttttgtgagggctccttccagctcccggatgtttgatttaacgttggtggcaatatatttgattacttcattgtcgatgttgtaaccttccagttcctctttcttgcggaggattgccattcgcgtttcgtagtcaggagactgtatatcgacggtaaggccccattcaaagcgtgaccggagacgttcttccagtgtctcaatctctttcggcggcttatcggatgaaatgataatctgctttttggcttcatacagggagttaaaggtgtggaaaaattcctcctgcgtactttccttacctatgataaattggatatcatcgatcagaaggatatcgttattcctgtatttttcacggaattccgttgtggatatattgtttttatttcggatcgcatcgatcagttcattggtaaacttctcgcttgtgacatacaaaactttggcttgtggattattcttgagaataaaatggccgatggagtgcataagatgagttttgccaagaccaactcctccatatataaaaagcgggttgtatatttcacctggagattcggcgacagccaaagaagccgcatgcgccagattattgttggcacctacgacgaaactgtcaaacgtatatcggggatttaaattggcgttctgtatcacctgcctgtttacttccagtgcgcggttaattagttggctcttatcagcttcttcctgtcgggcgccaacctgttccagtgttacaaattctaattcacattcgattccggtcagttcttcgatcgtaatctgaagcagaaatccatattttctcttaatatatccgagaaaatggatgtccggcaccaggatctgaagagtatttcctttgacatcgtatggttcggtgggaagcagccatgttttgaatgaaacatcggtcagttcatgctcttcctttatgtgcagtagaatctggtcccatttttccttgattttttctaacatagtaagtctcctaagtgtaataaaaaagcaaaactgcaaatttgcccaatctaatacctattctacattattataaagtatttttcaattaaaagatttgagtttaattaatcgccttattattcacacaccgcccaaaagcggcatgctgcgaataataaaatgcatcgagatgcacagaaaggtcaaaaagcgccgtttcacggcggtgtccctgcttgccggggttatgtatgtgtataactgatttttggttatccacgatcaggaagtattgaaaaataaagagatcacagttcttgttgtgaacaataaacaggatatcaagatattatcccactatttatccacaagttatccccaaagtgtggataagttatgtaaagtatgtgaataaccggtggatttcctttaaaatcaagggtttcagaatccacaaaatatagtttgataataaaaatgaggcacattttgttgattatgaatgtggacagataaaaaccggatggaagcaggcagattagcttacatccggtttaaaaaaagtatcagagggcaaagagcgggaaaaatacaattcctgcagcggcagaagaggcaatataaataatcggatgctttttaaattttttgataagtatgaatataagaatgaaataaataaatttcccccaggatatggatgttatttgaggagcggctgcggaagcttttgtcattgttattttaaaaacatcaaagccggcggctgcgatgaggcctgtgacagcggggcgcagaccataaaatatatgatcgatctgtttgttgttactgaatttttccaaggattttgataccagggttacgatgattatggcgggcagtatctctcccagagttgctgctatgcctcctgcgggtcccgctatattataaccgacataagttgccatattaattcctatgggtccgggggtagactcggatatggcaatcatatcggttattaattggggcgggaaccagccggtactgaggctgagctgccggagaaacgggatggtagccatgcctccgccgatggcgaacaggccaattttaaaaaattcaataaataaccgtaataatatcatttagtcacctcttttttagcaagcagccagtttttaagtataattcctgccagaccggatgaaatgataataataattggggatagtggagtgaactcggtcaggaaaaagaccaacaggcagatgaaaacccccagatatcccggactcctttcttccaaagccccaggaccgcatcaagtataagagcgaccacacatatggatacgcctgacattgcatgcttgatgatcagattatcctgaaaattggaaagaaaagcggcaatgatgctgattatgataatacagggggagacgcagccgagggcagcggcaataccgccggcaaattttctgcggcggtacccgataaatacggatacgttgaccgctataattcccggaagtccctggctgacggcataataatccataacctgttcttctgtaatccatttattcttctcaacacattcttttctcagtatagggagcatggcatagccgccgccaaaggtaacgcttcccattttaaaaaaggatataaagatagaaattaattctttcattttttatgcagctcctgtcttttattgttaccaggcggcaacagttccgtccgcacgcggttccgttgcccctgtcagagtaccgtccttatctctccatataatctgaccgcggccaaaggtaagggattcaggaagtactttaatattgtggcctctccttaccagttcttctgtaagggcataaggaaatccccgctcaacctcaatgttctttccgcctgtccactgccacctcggggcgtcgagagtttcctgcgggttcatgtggaaatcaagcgtgttcgttattacctgaacatggccctggggctgcatgaaacctcccataacgccaaacgggccgacggcacctccgtcttttgtgaggaaagcgggaatgatggtgtggaatgcttttttaccgggcttgaggcagttggcgtcctcttgattaagggaaaaactatagcctctgttctgtaggctgattcctgttcccggaaccacaataccggaaccaaagccccagtaattactctgtatataagaaaccatattaccatccccgtcagccgtacacagatatacggttcctccgcaccgcggatcgccgtgactcggattattggcattatgaccaatcagggtacggcgttttgcagcatatttgtcggatagaagttcttcaactgtgactttcatggaggctttgtcggctacatagtgtgatccgtcgcaaaatgcaagtttcatggattcaagatgcttgtggattgtatcggcggtgtccctttcggtaaattcaaatccctttaatagatttagggccataagggcaataattccgtttccattgggcggcatttcccacacatcataaccgcggtagccggtatgaatcggttccacccattcacaccagtagtcttccagatctgttttccggatatagcctccggtttttcgggaaaatgcatcaatagcatcggcaatctcaccctggtagattgactttgcaccggaataagcaatggagcggagtgtttttgccatatccggagatttccatgattctccgggggcaggggcatgaccgtccggggtgaatgtatcgaaccaggggttatattcttcggaggaaaattgtgtaaattcgtggtacgcattgttccaaagccgggagataataggggaaacgggataaccttcctctgcataggtaattgcaggcttcaataattcatcaaaggacagcctgccgaacctgcgggataattcagcccatgcagacggagcaccggggaccatgaccggaatccagcctcttttcgggactgtgctgtggcctgccttttttactgtttcaatatccagggccataggcgctttaccgctggcattgagtccatgaagccggttattaatccacacaagggcaaatgcatcacttccgatgccgttagaggtgggttcaagaacggtcatgcaggcggccgtggcaatggctgcgtcaacggcattaccatctttttttatcatatcgagtccggcctgggcggcaagaggctgggaagtacacaccatgccttttcttccatagacaacacttcttctggaagggtagctgttttttaatgcatcgtaattcataaaattctttgttaacctcctcagttaatttttattgtatataaagcatgaatcgtgccaaaaaaggatatagagatgaaaaacaatgaatttttatatagagcggctggctgcctttttattttgctgatcagcatcataaaactgctatattttgtttgcttaagtgtgaaaaactgattataataaatataatttataattattattgttataattagttatattaaacagattgaaaaagaaggaggattacagatgaacgtttacaatatgacacaggaaagtattcctgcagtggccgagctcatgtgtacgatgaagccggagtggtgggactatgagggggcctttagtcagttaagtgacattaatgagtctattaaaacaatcggatggtatctgggagaagattcaggtcatccggccggctggattttatgcagggagctggtgggactaagggcaattgaactggaatgcagcggttttaatgataacggggtttttaaactggaacataaattgggcagactgcttgatacggcagccggatatgcgagaggaaaaggatatctgacattcagaaacgggatcagctcggcaggctttaatatccatggaaaaaagatagagaatatagcagatgccatcagggatctcgagtgtgacaggattgactacaagtggatgctggattatgggttcagagtgatcgggatccagcccaatgcatatgaggaaggatttcatctgattatgatggctaaggagatttaataaatatgaaaaagatggttttgttcacataccggccggaaataggaaaaatatattatgacgatctcagtttgctttttggggatatatggagatacgtacgtgtttcctgaatgaggaggaaccatcggctgagtatttgtctcatgcagatattattcttgtaagcaattcggaaattataaataaaatccattatctgatcggggaacaggccaagattgtgacaattgacttcagctatccggagatgaatattgaacagatgagaaagtttccggccggcacgtatgctttgatgtgttttgacccgtttataagcagaaaaatgatcagtctgctgtatgaacagggaattaacaactttatctggctttatccccgggaggatggaaaagtgccggatacggagtatgatgtagttgttgtcgatgattattctcagaatttattcgatgatttaaagccggttatcagtcttggaaacaggaaaatcgcattttcaacgctgttaaagatagcccaggaagcggatatatttaataaagagcttgaaaatatgtttctcagatactgctgcagttataagggggcttcgactcttgtaaataatatatacaatgatatgtcagcctttcactctcaaatacgtctgattctggattatattgacagcgggatcatcattttaagcgaaaggatggaggtggttgagtataattcaagatttatggatctgttccatgttacaggcgagctgtacggaaaaaagattgaagaggttccggggacaggggagctgctgacttatatagaaaaaagaaaatcatacagaaataaactgattatgtatcctgccggtaaagcatcacttgttttcaatatggaatgtattataaggggagataaccagggatgcaattatatgataatcctgcaggaggccgaggaaattgaaaataagagccattcccttaaaagacagttgagtacgaaaggttatacatcaaagtaccggttttccgatatcaggacagaaagtcccgccatgatttcctgtataaaaaaagcggagaggatcgcaaggattgataaaacgactttaattatggggagagcggaacaggaaaagaattgatggcccagtcacttcattcagcctccggcaggagaaattatccttttgtcagcattaactgtgccgccattgcgccgtcccttttagagagtgaattattcggatatgcggaaggcgcgtttaccggttccaaaaagggaggaaaaacaggtctgtttgaaatggctgattacggtactttatttctcgatgagataggagaggcatccccggaggtccagtcgaagcttctgcgcgcaattgagacaaaggagattatgcgcattgggggagacaggataacatccgtggatgtaaggatcattgccgctacaaaccgcaatctgaaggaaatggtggaccagaaggcgtttcgtctggatttatattaccggttaaattccattatcataaaaattccgcctctgcgggagagaaaggaagacatccgatacctggcagagtattttatatacaacgaaattcacacgaaaagacaggtggatgaacaggtgtggaactttatggagcattatctctgggaaggcaatgtcagggagcttaaaaatgtggtggaatatatggttaacattacggacggtgacctgcatctttgtgatttacccgactatatgacagatgggaccaggacggactttactgcggctattatggacagcgccgtttatgaggctgacgagccggaccggttaaggcaaattctttcagaaacgtattcacaaaaggaaaacaggatgatttttttcatcctttcgctagtagcagacggagtcaaaaacaggaggaaaatagggaataaactggctggagcaggagaagaatgtaccggctacagactgaaaaaaatactggaaaacctgcgcagcctgggtgttatttcattctcgagggggccggagggaatacatctggaaaaaagtgggcaaaatttgataaaaactcatgaaatttcttgattttcttattgacgaagtggtttttcttctatataattgagaggatgtttaatttagaatagtctaactatgttaagatgatctttctgaagatatattagattacgaggaggtgtttgcgttatgaagatgacatttcagcctaaaaagagacagagagcgaaagttcacggcttcagagctagaatgagcagcgcaggtggaagaaaagttctggctgcaagaagagcaaaaggaagagcaagattatctgcttaatgaaccagggccgcaattttgattgtggccttttgtttattaaatatgaaaaaatttaattcaattaaaaaaaacagtgattttcagaaggtttacaggacaggaagagcattcgctaacaagcttttggtaatgtatgtaattaagacggagagggaagacacaaggataggaatatccgtaagtaaaaaagtcgggaacagcgttgtacgtcatcacattaccaggctggtaagggaaagttacagattgaataaagatcgggtaaagacaggattagacatcgtcgttgtagcgagagctgcagcaaaagaatcagatttcaaaaaaatcgaaagtgcatatctgcacttgtgcggacttcataacattttagagaatcgaagtgagaatattgattaaaaaaatccttataaagatgatacggggatatcagaaatatatttccccgcttacaggacctcactgcaagtacacgcctacctgctctcaatacgccattgaggcagtacaaaagtacggcgcgtttaaaggtatgattttggcctgcaaaaggatactcagatgccatccgtttgcagaaggcggttatgatccagttccgtagaggatgaggaggtaattcattggaatttatagtagcaactaaggccggttcaattatgggaccgattatcagcctgtttgggtatatcatggactttctgtttcgaatcaccagttcttttgggattctcaatcttggtctttgtattatcctttttacaattattacgaaattacttttgtttccgctgacgattaagcagcagaaatcatcaaagctgatgtcccttatgaacccggaaattcaggcggttcagaaaaaatacaagggtaaaaaagatcagacatccatgacaaagcagcagatggagatgcaggccatatatgaaaaatatggttccagtccaacggcaggctgtctgccgatgttgattcagtttccgatcatcatagccctgtaccgtgttatctataacataccggcctatgttccttcggtaagaatcttttttgataatgtagtggagccgttacagaaacagcctgattttatcaataagattgctgacgttgccagcagctatggtctggcaattgataaaatagactataataatgcagataaagttgtagatttattatacaagtttacgccttccaactggcaggcgcttgcagatacattcccgcagatttcaaatgtaattgcagaaaatgcttctaaaatcgaacagatgaactcgttccttggaatcaaccttgcaacggcgccgttcaccggttttaccaacatttcaattgcatggcttattccgatcctggccggtctgactcagtggttctccacaaagctgatgagcaatacacagcagatggatccggatgctcccggtgcgcagacaatgaatactatgatgatgacaatgccgctggtatccgtatttttctgttttacgttcccggccgctatcggtatttactgggtagttcagggtgcattccagattgtgcagcagcttgcagttaattcttacatgaataaagtcgatatggacgagctgattcagaagaatgtcgataagatgaataagaaacgcgccaagaagggacttcctccggcaaaggtaaaccagaatgccagcgctaacttaaagaatatacaggcacagacagagaaagaagagcagttgagaaatgaaaagctgtcaaagattgacagacaggtaaaagaatcaacggagttctataattcagatccgaagcctggaagtcttgcttccaaagcaaaaatggtgcagaagtataatgagaagcacaacaagtaggaggggtgccgtatggatatggttacagttaccgcaaaaacagtagaagaagcagttacaaaagcgctgatagagcttcagacgaccagcgataagctgacatatgaaatagttgaaaaaggcagcgccggatttcttggaattggttctaaaccggcaattatccgggctaagaggaaagagaccctccaggataaagccatcgaatttctcgagcaggtatttgatgcgatgaatatggcagtagatatcagcgttgagtataatgagacggaaaaagagatgaatgtaaacctgaaaggtgatgatatgggtattctgatcggtaagagaggacagaccctggattcccttcagtaccttgtgagccttgttgtgaataaatccagcagtgattatatcagagtgaagcttgacacggaaaattaccgtgagagaagaaaagagacgttggaaacacttgcaaagaatattgcttacaaggttaaaagaacgaaacgttccgtatctcttgagccaatgaatccttacgagagacgtattatccatgccgctcttcagaacgacaaatatgttgtgacaagaagtgatggggaagagccgttcagacacgttattatttctttaaagagagaaaacagaagagatagaaatgacagaagcgacagaaatgaaaaataaggtaacatttcatgctgtttgaactgttataaaataagtaataaccgtgaataaaaaatgttcaaatagttgtcttttactataaaagccctgtttgaacatttttttaaatcatggtgtgcggtaaattatttaggtaatccatgttggcagacagttaaaaccgaggaatgaaaaatatgatgacttcagacacaattgccgccattgcgacggcgcttaccaattcgggaataggtatcataagggtcagcggaaacgaagcatttgatatagtcgatagaatattccgccctaagaataagagaaaaaaattaaaagaggaaaagacatataccgtccattatggacatatccaggacggtgatgagataatagatgaggtacttgccattgtaatgagagggccgcacagctatacagctgaggatacggttgagatagactgtcacggcggcgttcttgtgatgaaaaaaatactggaaacggttattaaatacggagcgagaatggcggagcccggagaatttacaaaacgggcttttctgaatgggagaattgatctttcacaggcagaggcagtaattgatgtcataaattcaaaaaataattatgctctgaaaagctcggtgagccaattaagcggttccatgtctaaaaaggtgaaggagctgcgtgaaaaactgctgttcgagatagcatttatcgagtcggcgctggatgatccggagcatatttctttagacggttatccggaaaagttaaaagtgacagtgaacgatatgcaggaagaactgaatcgggctatttccacatttgacagcggacgggtactgtctgagggaatccgtacggttattctgggaaaaccaaatgccgggaagtcctccctgatgaatgtactggtgggggaggagagggcaattgtaacagacattgcaggaactaccagagatacgctggaggaaaacatacgtcttcacggtatcagcctgaacatagtggacacggccggtattcgcgaaacggaagatgtggtggaaaaaatcggcgtggataaggcaagggcgaatgcagatgatgcggatctgctgatttatgtggtggatggttcttgtcctttggatgaaaatgattatcagattatgaatctgatcgaagggagaaagtcgattgtcctcttaaataaaacggatcttgagatggtactgacaccggaagagataaaggagaagacaggcaaagaggtagtggctgtttctgccaaagagcaaaggggaatagaccttttggaagagaagataaaagaattatttttaagcggtgagatcgactttaatgatgaagtcatgatcacgaatgtcagacataagacagcaatgagcgaagcgttaaagagcctcagtctggtgaaacagagcattgaagaccagatgccggaggatttttattccatagatctgatgaacgcttatgagcagttgggaacaattatcggcgaatcgctggaagacgatcttgtcaatgagattttcaataaattctgtatgggaaaatagtagcaaaagaacccgataactgagaaaatttgcagcaacagattatattgtcttaactgttataatatgcagttgttttgtgattttacagcatgaaggttaaaggaatgacagaaaagaggaagttaaatgccgtgtttaacagaaaattatgatattgtagtggttggagcaggacatgccggctgtgaggcggctctcgctgcagcgagactgggatttgagacaattatgtttactgtaagtgtggacagtattgcgctgatgccctgtaatccgaatattggcgggagttccaagggacatcttgtccgggaactggatgccctgggcggtgaaatggggaagaatattgatgaaacattcatccagtctaagatgctgaaccagtcaaaaggtcctgcagtgcattctctccgcgctcaggctgataagcaggcttatacaaagagaatgagacatacactggaaaatactaaacatctgacaatccggcagggagaagtttgtgaaatccttgcaaaagatggaaaaatagaaggaataaagacattttccggtgcagtttactattgtaaggccgtaattctggccacaggaacatatctgcgcgccagatgtatctatggcgatgtgagtaacccgactgggcctaatggtctccaggcggcgaatcatctaaccgaatctttgaaaaatctgggaattgagatgtaccgtttcaaaacgggaacgccggccagggttgataagagaagcattgattttacaaagatggaggaacaatttggagatgagcgggtcattcctttctctttttcaacggatccggagtccgtacagaaagaacaggtgtcttgttggctgacttatacgaatgaaaagacacatgagataatcagggaaaatcttgatcgttctccgcttttttccggtgcaatcgagggtactggaccaaggtattgtccgtctattgaggacaaagtggtgaaattccctgataagatccgccatcaggtatttgtagaaccggagggattatatacaaatgagatgtacctggcggggatgtccagctcacttccggaggatgttcaatttgcaatgtacaggactgttccgggattggaaaatgtaaaaattgtaagaaatgcatatgcaattgagtatgactgcatcaattccagacagctgaaagcatcactggaatttaagaacatagaaggtttattcagcggagggcaatttaacggaagttcgggctacgaggaggccgctgtacagggattcatggccggagtaaatgctgccagaaaaattcaggggaaagaaccgattatccttgatcggtcacaggcgtatattggagttctgatcgatgatctggtgacgaaggagagtcatgagccgtaccgtatgatgacttccagagcggaataccgtctgttgctgagacaggataatgcagatctccgtttacgcgccatcggacatgagataggccttgtcagtgacgaactttatgaacgtattctttggaaagagagtgctattgcacaggaagtgacccgtctggaaaaaaagacgataggagccacaaaggaagtacaggaatttctggcctcccatgacagtactcctcttaaaacagggacaactcttgctgaattggtgcgcaggcctgaattggactatgttatgttaactgaaattgacccggaaaggcccaatctgccggaagacgtagcagagcagattaatataaatattaagtatgagggatatatacggcgtcagatgcagcaggtagctcagttcaagaagatggaaggaaagaaactggatgaaaactttgattattcagaggtaaagagcctgagaaaagaagcggtccagaaactgaatttgtacaagcctgccaatataggtcaggcatccagaatttcaggtgtatctccagcggatatatcggtattgatggttcatctggagcagatgcgttaccagaagtcggcagatagttctgagaaagtcagtatgaaaaatccgtgagaataggtgaggaataaaaaatatggatgaaaagtttgtctgtcagttgaaagaagaattaaagcaaatagatgttgaattgacggaacgccagatagagcagttctataattattatgaactgttaattcattggaattcaatgatcaatctgactgctattacacagttggatgaggttgtcacgaaacattttgtggatagcctatctttaaaaaaaataattgtggatatcggtcaaaaaagccagagtctgatcgatgtaggcacaggggccggatttcctggaattccattaaaaatagcgtttccggaattgaaaataacactattagattctttgaataagagagtgaaatttcttaacgaagtcgttgaaacgctgcaactggacaatattaccgctgttcatggcagagcagaagattatggcagggataatgtttcacgtgaaacatttgatatttgtgtttcacgagcagtagcaaacttatctacgcttgcagaatattgtatgccgtttgtaaaggttggcggttgttttgttccttacaaatcgggtaagctggaggaagaactggcaaatggaagaggggctgtgaaaaaactgagtggtgagatcgaagaaattataacgtttaccttgccaaacgccgatgaaagaagtctggtaaaaataagaaaaacagcgcctctcaataaaaaatatccaagaaaagcaggaatgccctctaaagaaccattgcgatgaatatttttagggttggaggacgcgtccggaacggaccatgtccggtgtggtgaggttttggctgagtcttccgtcccccggttggaggttggtcgtgagggggaatccagccggaatgaattgctgcggggaccgtttgcactctttggagtgcgcatcggtgctaagctcgtgaggaacctcgctaagcaccggcggactcccatgtcccctccgcaattgattccgcctacttccccgggtcagggtttcgccagggacggaagactcaggcgaatgttttcgcacaccggacatggtccgttccggacgctgattgtctccaacctaaatggggaggatcctgtcgcggccactacgtgtttccggcaggccgatatcaaatctagcgcgattctttaaaaaggcgtattgaaggcttatcgtatttcccgtacatggtagcactacgtggctgcgacaaggtccgcccccgtacttaacgcgtgagactatcagcggcggcggccagcggaagggcgaaacccttggccttgagtctttcgtcccggcgaaaacctggccttggggcggaggggaagatagagtctgcggatgccgcctaaatccatcgctgattagcgaggtcctgtcgagcttagcagcgagatgcatttcacagagcgggagtgtgctccgcggactgtatcttcgcgcgcagccccaaatcatgacaatcttcctccgggacaaaagactcatatacacacctcatcaccccgttcgctggcttgcggcgggtcccaaggttaaaaaaagataaggagaggaatgtttcacgtgaaacattcctctccttatcttaggcaaaaaacatggatatagcatccaggagtttagccggattttccaattgcggcagatgctttgccttactgataattgaggattcgattgctgagttatagagtttatattcttcgatgttatctaagatatatggctcttcagctccgcccacaataaagatgctattgtcaattttcttcaatgcattgataatattgcacttcgtatatttgcattccatacttgaaaagacggctttcggacattctcctaaatgagccgattcaaaataatgatcaatatagaatggtttagcagaatatggattataaaagtatttttcctcaaatgattcttctataatattccggctgctggcaatatgatatagaagagtaccaacgattggcaaatccagtatcaatttatagaatttagcattttttccaggtatctgactgcagcttgccaaactgtccggattcaccagcattaattgatcgaaaagttcaggtgaattattgcacgccataattgccagagcagcagattctccggtagcaataatatttgttctatgtccgatctctgatttaataaaatcacagagaagctggacgtagagataattggtgtaagtcaggttcggcttttctgaacggccgcagccaagtaaatcaatggtataaacggtatagttctgttttaatttatcaatcagtaaagtccactcgtagccgctggatgcaaagtttaaatcatgtaccaggagcagaggcctgccgttaccaatctttgtataatgaatgttacccagacgccatttgtaacagagcggatgcggttcgctcataagattcttagatacggcagtgatttttatatatttattaaagagggcagtagcggcagctccgcctgctgacaatgctaacaatgtcatgattttattttttgtattcattgatacctcctgacagataaactgtaagcgaatcataaaaagcctggtgaatatttatggggtccgcaggttttgtataacacaaattataccacagatcttcctggatgtgcattacaatattcttaaagaaaagactgttacataatattatacgcaccttacagcctcttatagcatgatggagcaaatagtgtaaattattttatagagaaatatggaaatatataattgcatgaaaaggcaccggtttagtgtgccaattgaaaatatcagcagttttaccaaaaactaaaatgtttcacgtgaaacattttagtaaagaaaatagacttttttacagcaaaaagtaggaaatagaaagcagatgtgctatactataaaatgacgcgtaagagaaatacgttttagaaaggaaacatcatgggacgtacaatagcgattgcaaaccaaaaaggcggggtcggaaagactacgactgcgattaatttgtcctcctgtcttgctgaagcaggtcagagagttttgacaattgattttgatccgcaggggaatgctaccagcggtctgggactggaaaaaggccagattgaagatactgtatatgaaatgatgctgggggattgttcttttgaagattgtctgcagcgtgaggtccaggaagatctggatgtacttccttcagattccaatctttccggtgcagagattgaacttctggatgtggaaaataaagagtttgttttaaaaagccacctggatcaagtgaaaaacgactatgattttattataattgactgtccgccatctctgagtcttttaacattgaacgcattagtggctgcagataccgtattggttccaatacagtgtgaatactatgccctggaaggattaagccaggttctgcgcacaattaatattgtaaaaagaaagatgaatccttcattggagatggaaggagtagtatttacaatgtatgatgccagaacaaatttgtctctggaagttgttgagaatgttaagaataacctgaatgaaaaaatatataaaacaattataccacgaaacgtacgtttggcggaggctccaagtcacggaatgccgattaatatttatgacagtaaatcgacaggggcagaaagctacaggctcctagccgctgaagtaatcagcagaggagaggaactataacagatatagctgagaatgtataaaattacatttgttacttcttcataaaatagagcatatagtaataagaaatgaatggatgaataaacaacacagcacaaagggaggaaacaatgtcgaagaggacaggacttggaaaaggattaggagcttttttcggtgacgattatgatatttcccagacaaaaccaagggctccggaagctgttaatgaggagataagaacaggaaccccggaagagccggcagatcatgcagataagaaagctaacctggaggaaatggatatggtacttcctgttgccaaaaaacctcagaaaaaaacggaaccggctgcaaaaaagacaacaaagccggtacaaaaagtaaaaatcgtagaagttgaaaaggaaaaattcctgaacatcacgaaaatcgaaccaaacagcagccagcccagaaagatgttcgatgaagaacaactgaatgaactggcaaattccataaaagcatatggtgtattgcagcctcttctggtccaaaaacagcccatgggggataattatgagatcattgcaggagaacgccgctggcgggctgcaaagctggccggtctgaaggaagttcctgttataataagagaatatacaagacagcagacaatggagattgcactgatcgagaatgtccagcgtgaagatttgaatcccatagaggaagctaaggcataccagatgctgatccgggaattcggtttaaaacaggaagatgtagccgagcgagttgctaagaacagagcgacaataacaaacagcatgcgtcttttaaagctggatgagagagtacaggaactgttaatacaaaacaggattacaggcggccatgcaagagcgcttcttgtcctggaagatggggaacagcagtatcaaattgccaataagattattaataataaattaagtgtccgagaagtggaacgattagttaaattattaacaaaacctgcgaagattaaagaagttaaaccggaagaaaaggatttcaatatcttttatcaggatctggaagacaaattaaaagctgtgatgggtacaaaagttattattaataagaaggataaaaataaagggcgtatcgaaattgaatattattcatctgcggaactggaaagaatagcagagcttctccagtccattaatggttaaatattaatttttatgaattttattgcacacttttcaatgtcatagaaattaaagaactgaaatgaggacataagatggaaaatagtatattgaataacataggatttgatcctggatttttgattatcgggttaagcgtactaactttaatatcattgattgtcaccattatctgcctttcacagtataagaagctgtaccgcagatatgatatgtttatgaggggaaaggatgcggaaactctggaggatacaattttggatctaatggatgaagctgcgtttctccggtctgaggacagagcaaataaagatttgatcgagtccatggaggagcaggtcaaagccggataccagaaaacaggaattgtaaagtataatgcttttaaaggaatgggcggaaacctgagttttgtaatcgctcttttggacgataataatacaggatttgttttgaactccgtacacagcagggaaggctgttacctctatatgaaagatgttgtggaggggaaaacggaagtgcttctgggaagtgaggaaaaggaggccctcgaacgggctctgggttatcactaaacccattgcaagcctccgatctgttgcagtgaaaatagctgttgctgagaagaatcggtcaaaagtattgcaaatttccgtgttttgtagtaaaagtaatagatacaaaaaagagcaacaataaatttaaaaggatagaaggtgaaagaatgcataagtttttacgcgctgcaggattcagcatgtatcagaagaagaacgacataagggcgctccttcgctgcctctctaaggaagcggtgagttccaagtgtatacaaatagacagagataccaatttgtgtgagatgaagacagaaattgccccgggtttgggaatcgccatgtacggtgaattgaatgaaaaagatgaactggatgtggaatactattttccctatatttccaacgatactgtcacatcgaaggcggaatgttccatacagcgccatgcagaaaaagaaacatatgcaggtctgctggatgaatataaagtgggaatttcattaatattttaccttcttaacccaatggaatacagggagaggacccagaagaccaattcaccggtcaaggtggaatcggccagcctgtcagcgctgtcggtccatggaaagattcttcttccaattaaaaaaacagccatgcagatagaaaaagccaaggtagcttcacggaacagggacagtctattggaagcggcgaagaatggtgacgaggacgcgatggaatcattaacaatagaggatattgatctttattcccaggcctcaagacgtgtggtgaaagaggatatttattcgattgtagatacctgtttcatgccaagcggtattgaatgtgaccagtattcagtggtgggcgagatccgcgatatcgatttgaagaaaaacaggataaccggtgaagaaatctatgatatgaatctggaatgtaatgatttattcttccgggtcgccatcaataagatggatttgctgggtgaaccaagtcccggccgcaggtttaaagggcggatctggatgcagggaacagcaaattttaaaaacaacggaattttgtgatagaaacaggcgtattttttacaaagggacttgacttaatcagggaatatgaattataattgacatcgtgcctgtgatgaatagggcagtagacaggagaaattctgtatgaatttattcatcaatcctaatatgtgtttctgtagctcagcaggatagagcgtccgcctcctaagagaacctactgcggacacattttggggatccgccccacacaaatttaatacgtgtttctgtagctcagcaggatagagcgtccgcctcctaaggttgtgctctaccagctgccttacggggaaaagtgatcgttgccagtctcaatttaatataagtctctgtagctcagcaggatagagcgttcgcctcctaagcgaaaggccgtgggttcgaatcccgccagggacgccagcaaacacgccgaaaacctttgatttatcagggttttcggcttttcttatttctgcggcttttgtggcttttttgcaaaaaaccttggtttgctaacatttgctaacgagatttggccttttgctaagaaaggcggtaagtcagaggttcgatttttaccaaaggaacttgcaaacatttgttagcagaaattagaggaagttgcaaacaaaatcgcgaatttgctaacatcgctcaaaaatgctttcagaaccttgctaacaaaaaaagtgtttggtcactgtgcaaagtggttcaaacgaagaaaacctctcacaaagtgagaggcgttcttctgagggagggactttataaagcttttgccagctgcttgagcagtgcggcagtttcgggatttttaagcagttccagtatcttcgctgcatcactttcatcactttcagtgacggcagtatccgcagttttaggctctgtatcttcaacagggtcaggagtcttggatgagtaaaatgcttcctccaatcgctgagcgtttatgcagcgatcctcgtcgatgatgtgagagtagacatctgcaaccatttttacctgagcatgaccagagtcgccctggacggatttcatatcgccaccattgagtttcagcttgtaggtgatactggagtgacggagagaatggaatacaacatgaggcagtccgttttctttgataagtttattgaaagcacggttaatcacctggctttccatcggacggccattgctggagcaaaagaccaggttattgtcgatgtattcatctccaaacagatccatcagctcatcaatttctttttttctctctaccagcatataggcaactgttttcggcaggtacacgcggcgaatactggttttggttttaggctctttcaggaccagagcagtatgggtactggctatgcaaggtggaaacttcttaataacacctttgtcgctcaaatcgtccaatgcacctcgtgtaacccgttgcagctctttgttgacgaatatataagctgaaccattttctatgctctgtggtgcaatatcaatgcagtcccaggtaaggcccagcatttcaccaatgcgtaaagagcaggagaacgccagatttaaggcaagggagaggataggatcatcacagacttccatagccttgctcagcgtttcggcagtccatatatcccgttctttatgttcttctttgggaagtgtcgcattcaggacagggttacggctgattagttcccaacgcaccgcctgattaaaggcactgcgaagtagcttgtgaatttctcttactgtatgcggggtcagatattcgcttgtgggtttgcggttgttgacgcttaccgttttcacagagagcagatcacggtaatacttatccatcatccttggagtgatgtcggatagtaacatatctccgataataggagttatgtagtttctcgccagaccacggcggctttcatatgttgacattgcccaggtatttacaccatagatggacatatattcatcgagcagatcgttcagggtctttgccgtaggaataaagaaggttccagagtcctgctcatactcaatttgcttttttcgtttttttgcttctgcatttgtgctgaaggtttcccaacgctgtctgcgttttccgttttcatctgtgtaatcatacaccacagaatatttgcttttacgcttcacgatagatgccattttcattgctcctttctgagattttcacataatgagtttgcttttgataccaggcttcaaaactgctggtaatgatacgaattcttcgatcaatcaaggtcgtctcaaaatagccccttttaacaaggtcataagctgtgccagatttcagccccaaaagatccgccatttccggaactgacatcgtagtatgcctccatttctctccgggcggtgtaccatccacttttttatagtggaactggccggcataccaatcttcaaagctatccagcataactctcattcgtccggccacttgaattgttttgaaatagttctttttaaccaaccagtaggattctactttaccaagcccaagcattttgcccatctctggtacagacatactggtctttactctttgtttttgcatggcttttgcctcctctataaagtttttcttgctatggcctcattgtaagagaaagcagaaaaaaagttaaggatgtcgatttggagatcggcatccttgacaaatcattcatctgcgtgatccagccagtcatcaaagctctttttggaaatgcggatatgaccgccgactctgacgctgtggaatacaccctgttttaccagattatatgctgtgggacgactgatacccagaatgtcctgaatctcatcgaccgtataggttcttttgtcatagctgacaggattttgttcattaaagcggttcaattccgcaattcttgcttcaaacataaaaacgcctcctttatccggtaagtggccttacggagcctccatttcctccggaatatgaatatctaaactaacttgcagagcatcatcaatcgctctcatttcttcgcgagatacgcgcccaatgtacgataaaacacgccttttatcaatcgttttaatttgctccagcagaacaacagatttcagtccaagctctggaacgctctccagtgcatagtgtgtgggcagctcctttttcttaatccatttactggtgagtggagctacgatcaaagtggggcagaaaaaattccccacattgttttgaagaaccaggacaggacgggtgccgccttgctctgatccaaaataagggttcaaattggcataatataaatccccacgcttataaatccaatcttctttcatgttcatcctcctatgttttgagatttgattatgtaagaaggaggctctgcaaattacagagtctccttcaatttagcgcctgttttatcccttacttgtccacgacaccccagggatttgggtaatcattaagccgcaggtggctggcctgcttctcaggagtttcacctccacttcgtttggtcttacccatggcctgcgacggttattatcacgctcggactatggctgtaagagagctttcctccttgttatgccatgaccggatgccatccgatgtattccagcctgatatatttctgataaaccgaaaactcatctatacagcaaaaatgggttggcctgttatgcgagtggcagctctcagaaaatataccgctgatgtagcggctattacgcccaaagaggatcaaacttaatgattcgtatatgaggttgtcaaggtgcaagtgaaaggatttccctctcacttgctactgccacttttttagaaaatcgcaaccaacttttttattttttcttcaatttttttcaatcgcttatctgcggcttgccgagtaataccatatcgttgggctaaacaagttgcatttggtattttcatttcataataggacaatataaaatctcgttctgctggactcagtttcaatagagcttggtgtaaatcctcaagaagtaaattctgaatagcttgttccgcagtatcaacagattcatccacaaacaaatctgtatcctgataaccttcctctgtgccgtcacgatctcccacatgagaagccgggaatatagagcgacttttctcatgttcctggagatagcggctgtggcggtcctcctgttggtatttttcaaaatctttgcgagaacattccatgataatgcggtcatcttcatcacggaacattttgactgtttcaacaaaaaagcgcccagtaaagcaaccattgcggcgtgccttactgaacgctgaaaaactgatttcctcccattcctgtgggctgttatttttccaaatgaatactctcgtcatatcctttcctccgttcaaattcttggtagtcagcgaatttgaacggtgtcatggatattttgctatgtacgcctcccagcgcataccggcctcctaataccgggcaaagaaaaaggccggaagtgttttcacctccagccatgttcctgccgccatattgcagcaggaatgaaaaaagcccggttaatgccgggccttatgtagaaaagtattcaatttagcgcattcctgccactataacaagtatagcaggtcggaagtcggaagggagtagggattaggtcggggatttgtcgggatttagtcgggatttagtcggggcagctcctccaggacttctggaatagaatatccaaacaagcaaacagaaaataaatagatggcttctcgttttcggtcataaaagacactgcgctctatatttagttcttccagcaattctttctctgtactgttgaaccgatagataaattgcttagtcaaaatttcatagtaaagttctcctcgatccggataccgtttcagacgaaggagtgcacggtcaataatattgactagcatttgattttgaacaaggcagcaaactttttcttcaaaggcttgcagttcaatatctggtgcaaaattttcaagatagcagaggccagactctatatcttgttctcccataatccaagcagtttcttgtaattcttctgcccgttcactcagaacccagactacatcacggtaaatctttagaatcagcttacttctatgaaacgcagcgtcgctgttaagccccaaagctgttagcctgctgttacatttttggattgttgtgctttcttttctcatagaacatccctccttgttcgcaatattgcgaacatattaggtacaaaatagcatagcagaggagcgtgagagagggcagtgcctctctctattcccccatttggttatatcaggtttctggattttagacgaatctgcattgcttgcttggaaacctcaaaaatatttgccatttcagcaatgagctgttcatctgtccggcctattttaagccggtaaaaacattttttgatctgcggtaaaggcatcagcagagcagaagccagagtatccgcctgacgctcaattatgccatgactttcgtcggaagaaacatttccgttataagcagcaacatctccagtaccagagtacaacttcttatgtagtacccaatgagccagctcatgggcacaggtaaaacggagccgccctaattttgacggatcacaaagccgttcatcaattaagattgtaccggctcttactgcaatcattcgatactgtctctgtatctggtcatataagacaacagcaccgtcatcgaaaattgtttcccctaatatcttggggttttttcttagtgtatgaaactccaggattagatcaaactttgtctcgataatggtttcgattggcacaggacatggttgcccggatagcagagagggatcatattccatcaggatttttcgccctactgcctcgattgcttctgtacggatttgtggaattgacaaagctctcccccctatcgtttacgctcctttagcattttcataaatgtctgccattcttcatcggtagcatctacttcttttgccacacgcaaggctgcccgaacaatatctttttccatgatatagtctggcaaatcagcagatactgtattgcgtgattttgcagccagatccaaaagcaactcatgttctgatttatccaaattcagaaaggcagagatgcgttccacaaaatctccattgggtgcaggacggcggctttgctcaatatcacacagataaccgtaagcaatattcaaatgcttggctgtatcgcgtaaattgaatttgtgcgccttgcgtttctcggctataaatgatccaaaagttatattgcccacagcattcacctctcatttgttcgacgaactgcgaacatcttgcttatattgtatatcgaacatctgttcacttcaaggataaaaatttcatttgaaaagaggtgttaaaaatcaataacacctcttttgcgctatataaattcctgagcgatttgctgcatttccgtaatgcactctttgggagagagaatttttattttccctttgaatttgaatatccagccataaaaagttccactggggttcacttcaattttggctgtgaagtgtgtatcatcatacctatcaacagcagcatcttctccataatgatctatgattactctcatcaattcgttttcacatagaagggttacttccttcgatgactccgatgtaaacatatcaaccattttatttgtataggaggctacatcaaatccctctatcggcataaagtaagtttccagattttctacacttgttagccgatctacacggaagtgagcaattttctgatgcttcagagaaaatccaatcaaatagtaatggtcatttttccattcaagcgcatagggatttacgacataataatatccatcgtgctttaagattttctttttttcctgagtatattcatagtattggaaccgaatttgctgatggtttccaatcgctgtttggatattatcaatgatatagtaaaccttttcattatgcggtttgacacggctggataaagcagcaaatttttgaagctgttctgcctgatgtgtgctggtcagacggcataatttctgtaccagttcctcggatttcttggcagaaatgatcttcgaggatgctactgcgtctgtcagcattttcagttcaggatactcaaacggtcggcttcccataaaatattggttttgggtactcttgaccaccacaatatcaatccctgcatcgatcagcgcattggtatctgcgtaaacagtctgccgcactgcctgaattccttttccattcagatgggcaatgatgtcagatactgtggcgggatggttttcatcggtcctctcatagagaaaccggagtaattccagtatccgcatatttgttgaattctgcatacttcacctcctcgattcttaaaatggcctattttgtatggtgtccagccccaaagaccagaagcagggcgacagcacagagaagcaggccgatccaatttcgatctataatcagcttgatcaccgccacaagcagaagtccgcctgccaggagcacaacgccattcattcagcgtcctcccgaagcatagtttcccatgttgatgtccagcacccctctgggcggctggatcagggagtcctcatactggcacttccactggacctcccggcacatctggctatccgccacgccgtctatggtttccccatcctgaatggggttatcatgctccagaatataggacgctgcattataggcgtggtttaccacccagttggggtccatgccgtggaagtggtactggagatccggcaaaaacagggtgctcatgcccaccgtgtcgatgagcatatcctccgtgccctcgatgttgaagaaacggacattgacgccaaagcggatgaaccgatccggcccctcaatctgatgggagcgcacatcctctgccagaaacagcttgccgcagttctggaaatagaacgcctcacaggtggggtacagctctgccagagcctccagaaagtcggcatccaggttggcacgctccagcgctggaagcgccgcagtcagcatatcggtggccaccacctgatatttgcactcccggaagatccggtcacggtcctcctggcagtcccacatctggctcatcagaaaggcatcaaagcctttgcccttgaacttgtcgcatttcatcaccatcagctgtaccgggtacttgccgtcctgaaattccgcgacatgatccagggcggcaaagccggccattttcttatcataacagaagcactctgttgatccgatgtgcttctccattatggcagtcattttttctttatccggcatttctaccggctctttgaacagcatctgaatgagatagggacctccgggctgggggccttttttgtcgtccagattttgctggaaagctttattgctcatttgggttcctccttcttttctgggaacagtttccaccgaaactccagctctttctggacaaactctttcggcaggccgcgggggttggcgatgagataccatacccgaaaggtgcgcttcttcggatctgtttcctgccggtagagctgatagcccgcctcatcctcctgtgtccactgtcctgtctgccgcttggcctgcacaaagggttccaccacctggtccagttcctctctggtgtggcttgaggcccaggcttgatccacatcattggcgtgggagaggtggaacaacatcgaacccatccagttctttgccttgtgtccaggcgttccgcgcaattccgcctgacggcggtactcctccatctgctccgccgttccgtaccgttccaccatctgctcccgcacatagatgaaccagctgtagtcctccgcctcggtgaaggggcgcagaccggctgtaatgcctccacggggtctgcctcgaagcggtcgatgaagtcgaggtagttggctttgaccaggggcagaaaggtgtccagcagcccggtgttcagccgcaggtcctctgtcagcatccgaaagaatgaaccgcctgttgtgggttcaattctgaaagagtagaggtagtcatctccctgctttatgatacagctgaagcccacctccacattcccatggccgatttcgtagtctatgtagttgtagcggctccggtcaaaccagatctgataggtcagcccgtttttcattttctttttgaagtcgccctttttcagacgcttccagcccttttcctccaggcccaggccgttccacaggtagtccagaagttcctgaattatatctgccggccgtttttgttccacggtctccaccccctgacgaattctctttaatagtcaagcaggataggcacctgctgctcctcggcaaaccgcatggcccgccagaacatggagaaggcaaacttggcaagggattgagtgtcatactgggtgtgttccgggatgtctgccttgctgtactgtccatctgagtctacggttccgtctaccgggtatccctccgtgtctgcccagccaaggatagtgtcctcatcggcctgccacgccagctggttcagcttttccagctccttccgcagtccgcccaaggtggcgatagcggcggtgtcatcggtaggcaaggacccttggaacagaaagctgtcagaaagagggagccaccaggtagccccacgaaacagggaccacacccgctcctcatctgatgcaaggcgggcgaccagaggatgctccccgaagatccagtccttctccacggtggaaggcaccggttcctcgtatgtacgacaggcggccaccagcagcatagcgccgaaggcatcccaatccggcttgtcggtgtaataaggtttctcattatcttcaagccagggagcgtagggggctggcccggctgagaaatggcgctcaagatctgatcccgccagttctccaccgccgcctggacctcagccggggacatttcttcctcgttatcagcaggttccccgtccggggtgatgcggttgaaagagtatccgttttcctccgcccactgctgcacaacagttttccagttgtgagaatagtaccgggtcagcgtcccggcgtagatgtcaagtcccatagtaatgtctccttttcaatcaaaatccatccagaccaggtgttttccgcagtggaggcactggaacagatagcattgcagatgcccgccattgacagattcccggatcatttctttttgctcatcgtcccacatcggatcgtccagtacctcctccagcacacccagggcccgcagttctctggcacccacatggcccaggtaggcgcagtagtcgccgcagtgggcgcgccagtattcctgctgccagccggagtagccgggggtgcggtggatcagctcgtccagcttctccggatcgtctacaccatcgtccacagagaaatcatcttgaaaactaccgtcatatttccgggctgcttcgccgttggcgatgcactctgggcacagatatgcaatatcctccactgaaaagaacggattggtatagaaaatatgggtcgtcttgccacagcagtcgcagacaacgccgtctgcggattcctcaaaagccccagtttccagagggtttgggtgataccggaaggcgggcaggcccagctgggcctgccgttccttctctttctgcttttcctccggcgttttgggcttggggagagcataatgattgccccagttttccgcatagtccttcagcgtgcccagccgcttgagggtctttttatcggaacgatttccgatttggcagagcagttcataggcatccttcttgaagtccagtagatcatacacatccaccagcacttccttggcctgctgatcctcactctgctcaagttcttccttgaaggtatatagagcgcggacactgtccggaccttcattggtcgcaacaaactgtttttttagttcgatataggttttttgatattctgtcattggtcgcacctcccatcaatcccaccagaaataccagacggtggactgccacaggacagctgccaaggagccaatgcttccatcctcattctgatccagatctgggcagaaaccatattgctccacagccacctccatagctctttccttggaaatcggagttggaagttcaaactccaattcatcgtggctcatggcggcagggatggcaccatgttgctcgaaccagtatttcgccactgccatcaggtccggtgtgtcgggacactcattccaatttccaaagggcaggtaggcgaagatctcccaggggttctttaccggaattttagccagaatgagcggatatgtcattccggtatcatcgttccaatagtttgcgaagcggtcgttgggttctccgccctccatctcgcccaggacttcctcatcccagtccagatcatcgtcctcggcttcttccttgcgctgaccggtcaattcctccaaaatcgcctttccgtccttgatgggagcggagagcatcttctttcgatactcctccacggttttgaggtcaaattcatagaagtccgcatcatgctccgggtcagcgttcatcaccagacactccaactgcgtttcatcatccgcctggataagtacgggaacaaagccctcccgtaccccagccgccgggcgtagctgtatgctgacatgatgggatcatcatctgccatagacgggaaataggtacactcacagtccagatactccataatggcctgcgccacctcggaaggctccagcgtatcctcgtcaaagtcctgtccctgccagttggtgaagcgttcctcaattacctctgccatagcctgatagtagtcctcgtcaaagggatgaataagtatgcctcctgttgaaattcattggagtggtatcgggacggaccaaaatatttcagggcatagtcatcaatgtcggcaggataatagggcgcatcaatttctccatagtaataatgggcaaaggcacggcctttctgattgaacagagccgagaatagacagccgaacagctcctcccggatgaatgttcgtaggtctgtgttgcctggatcggctttgacctgatttaccacttcgccatgctccgccaggaatttcccgcccatcaggtcatgctccatgcaccagcgcaaataaatcgccatgtggttgtaggcgttgatggggtcaatgggaagctccttctcctcaaggttctcaatatgataggaaacatcatccattcctatgctgtcatcgtcatcctccggatctccctttataggctcgtaaccgatcttcagggtcatctgttcctctggcagagagacaccggggctgcgggtgatggtgtgcttatcgtccgcagaaaaaccgatggtctcgccgtcttgcagcgtcacatcacacgccagcacataggaggcaaggcttgccaaaaagtcccgtagttcctccggctcagcgtcggtgttcaacacctccatttcctccttgccaaacacatccatgccgtaggtgtagccgtttaggccccctcgctccggtacaggccgaaccaaacccagttgaagatgggcagttcgtcctttttgagcatatcggcaaggccctcatagaaacgaggctcaaataccacgccgctggtgtagacaccggtggcgtatttctgcttgcagcacactgccatcgccttggtgaacagcttacctcgttccagcagtttttcctcctcgcccaacacagccaccatgatatgggccttgtgcgctttggccacttctacggcctctggccacatatagttgttttcggcgttgatctctgcttcattgtccgggatgtgaccgtggaatagtgtcacaatcagcatcatattgccgacccgcattaccacagcgtcatcgctgttctcaacatcttcgtcgccctcatccggctcctcatctacgataccccattcttcccgcagatctcgaatcaactgctccttgtcccactctgctttggagaggagcacagatccggcaaaggaacccttatggtcggtttcctcctcgtcggcgtcatcttcaagatcctctgcatcttcatccggatcatagagggattcatgctccagtccgcggataaattcctcaaagctgtctgccagatgggtaattttatagtcattttcctgatccacatggactaccgcaggctctccctgagggccgcaagcccggtagtccaggaaaatcatatcgtgtccggcgcttggacagtcgcagatggccacaccgatggcaggatactcccactcagcgatcataaactggctgccaagctctccacagagggagcagctcttttcccgtccgattccgaaaatgccggtgatggccacatgatcatctgaccaacaggtaggctcatcgcagggatagcaggtgttcaccggaatgccgccgttgtgctgcttcatcagccagatgtaggcggcgggcagcttgtagcccagttcctcctccacgctggcgatcagctcatcggaaggcggatcactgacatattctttcagtgcataccaattatcatcccagaagttggtgaggtcgaagccctcaaatggagtatcaccgggcacgaatttggccttcttcttccggctgcgctggcgtttccggatctccgccttacactcccgaattactgccggggcattttcgtcctcggggtccagctccgcccaccgctcggcgtaggggatggccttttcctcctgaccatagagatactgatagccataggccatccgcatattccactccgccttgtcctggccttcctcccggacggactccagcacctcaatggccctcagaagggctttgtctcccttggatttcaaagtaccttcgtcatggtccccgatgatggcgtagttctccagtgcacgggccagggcgtaggcggtgcggtagttcctccagttctccgggatggcattcagtgcctggatacagcgggtgtactcatcctcgtcgttccactgctccagctgctggaagaaggattcggcgttctgttgggtgtaaggaatatagtccatgcccgtcagcgtttcgtccaactcgtcatcctgattctcagtttctgtcccatcatcttgttgctttaggggtacagaaccggcttcacggcggaaggtgtggaagatggcccatgggatgtccgtgccttcaaagaactctttcgccatgttcagcgcctcttggatgtcccaggcgatgaagtccacatagccacagtagaggccggtagccccgccggtgagagtgagcacttccgaaccatccccgccggtgagcacttcctccagtttgtcccggaagtcgaaaattttctgactgccttcctcctcccgcagggtatccagggatagcagaagaagcccgccaccgcgccgtcggcatggagatcgtccataaaatcattgtcggcattcagatagccgttgatgagcggcacacagcaggtggaaccggccattacatccagccgccaatcggcgtccgggtcctgtttgggttccattttgtaaccaaggtagctctccagataggcttccgggtcggtggagagctccaggccctgcttccgcagtttgtcgggcagctgggacaggaggaaggacggctctgccttgggttcctccagcacatcaaagctgtctatgtatctcatgtgggagatctcgcccagcacttggtcggtgagggtagtgagcatccaccaggcccggccttcttcctcttgaagcttaggcagcagcttttcacagtaagcggagatggcaaagctgttttcaccctgttcctccagccagatctgcacatcatccccggaaatctcccagccatcattggttcgcagaccgatgttttgaacaggttgacggcccaccaggatgttccagtgctccagcacctctttcggagcgtgcttctggaagtagaccagctcaaacagtttgactttgtcgccctctggggtgaggatcagttcatgcttttcgccgcccacgcccagctcaaaggagatttcatcaaaggccagattcagggtttcctccatttgggccacgagttctgcaccgcgggtgtgatccttgtcgtcatccatcatctggcgcaattctgcttccatctcggcaaaggtttcccaccagttctctgtccgatcccggaagcactcccagaactgcggcagagaaataccctgcttgcaccggtcgataaactctttggtgtcatcgtcaccagggcggacttccaatgccttttcaaaatatcgcagagcccggccctcctgatccagataaaagtaggagtaacccatgcggaagttccagtaataatcgtcctcgaagtattcctcatggggctttagcagagcgagggcctttttgagcatttctttgcaagttggcttatgtgggtctgccagattgttataggcacgggctaactcactgtccatctcaggggtacgctcctcggcggggatggcctccagcgcatcaataattttatgttgtttgctctcctcatgccacttctggcactgcttcaaaatatccatatcagggtcctcctcgtcctcatctggtttccagtctttgatcagctggaacacgccattttcatcccgctcaaaggcgcagggagcgggggtgttcagcaaagggatgatgtcgggatcgtcattgcagatcgtgttcagcttgtagatcccggcgttgttagggtcgtccatgtactcgtcgctctcatcaccggcggtaaagcgccagccgctgtcccagccgccgtccggctcctccctgtagcagtagcccaccttgcggccctctactgtgatgcggttggtggcgatgcagccatcggcacccttccagtcagggagcagagatttcacatcctccgctttcacatggtagtcccggttgcggccagcggcctcgtacagttccttccgcagcgcctccacatcccgagccatctcctggatctcctcgttgtccatcatctcactgaggtcatattccagcggattctgggcaaaatccgccagtgccttgttcatggcgtcatgctcctctggcgtgacggtgatgcggatgcggcgggcaggggtgttgtactcgtccagatcctgaaggtttacactgccgctgacgctgcactccagtaggatggcggccagatcagtgaccacatcaatggcgaagtggaagtccatctccacgccatcggagtgtgtaaactccagatactccacggtctggcggaagtcccagttttgtttgtccagcccaatcttggcaaatatctcgctgagggggatctcctctttcttctggtcttccaaaaatgccacaaggttcagactgtcatcggaaccgccaataaagttgccctagtattttttgatatacatttgtcgtgcctcctgttctgaatccagtcgatcaatgagctgattcaagtgttccaaccacgcaggagcgatctcaccgctgtcctcgttcttccaaagatccacaatctcacggatgccgtcctcgtccggcacctcgtttttgatgtcggtgagctgccgcagcaggaaagcaagggcttctttggatgctgtgaaaccggtgactttatcccatatagcttcttcatgatcgtagtccagtttgctgttatccttccattggaaatacagctccgccagagccatcgcagtattgtcaaagaggaagtcgatttgtgagaagtcagatcccagcatgacttcctctttcatcagttcgatcatctcgcccagatccattaccggatgctccggtacatattcatttttgaggatgtccagtacatccaacccttcgtcacgctctaatgcttttatgccccatgctcccatgtcggcacctctctttctttatttcgtatcaagcttctattgtcaatcatagttctccaaccgaatgataggccgataaaagtcataatctccgtttagttcattgtcctcctgcacttctggcttacagtggggcgaacagggtaggaaaccgagaaatgggcccagcccaccgcagatattgcatccgccgtcaccgccgcaggtggtaagcctatcagcctgcaccacttcccgcatatagggatcgtaggcgatggacaggccgaagaagttgggttcctccatgtcataaggccggttctcatcctcatccatatcctcaaaccagcgcagacgcatggagtagtctaacccatctccccatgggaacagggtccgacaccctccgccgcacaggtaggcccactcgtccgccgtgggcagggagaagcccctgttttccagcatggcaagaagcgcatcgtagtctgtgcggttatagatacagatctgaaagcccttttccgtccgctcaatgcgggccgactgatgcaaggtaagactgctgctgtcactccaggcaaaatcacggaattccttcagccagtcagggtgggcagtcagcctgggatcgtccattttgactggctcccagttaatttcctccagttcccggcccaccagcatggggccaatggccgcctgccgaacgggagccatgctttcccgaatcatctcctccgggttctgcggttccatttcccattcccggaacagatactccaattcctcccggctctcctgattcagtccctcggcaaactgctcccagcccagggtgacggtatcgccggggacaaagacgaactcccgaccatctttcttgaagatgccggtggtgcagctctggccccagcggtcaaaagtatgtagaccgagaaaggtcatatcataacgggcagccaggctttccatcagtgtctgcttctcggttgtatccatttgattgaattggggacgggacagtttttcgttcatagtaagttctccttcgattcgttttgcgtgttccagcagatagctccgaccatcctgcttggcccgttccaagtattgtggaagcaggtcggaatggatggcgtccagtgagaccagaacggcgatccgctggtattcctgaagttcaggagagtaacagttgcgctcccagaacagcggagcgaactgttccacacagtcaggacgcagagcgggcatcgccaaaagcgcccgccggctcacatattcattggggtcctttgcgaaatctagaattatatccctgacttcctgactacatgagcattccggcagataggcggcaaactgccacttggcctcactctcattggaggctgcggccctgcggcagaggcactcaaaccatttgggatgggaagtggtttcctgtataaatccctccgcttcgttggctctggcaattaaatagaccatctcatccagcagaatgctgtctgccatttctgcatccatttgggtcaacacatggcaaaaggcatcaaatatatcattccacgcagggtaatcgacctcccatgcaccgccgatctcctcggtggtttttccgggataagtgatttcctgccactgatgaaattttcctacctgctccagcaggcgttcacgaatgccctttgccatgtgctcacctcactattctccgaaatgttccagatacaattcccgcacggaataaggacctacaagggttgtttcctgtcggccatcccaggaatacacatgaattttgccctcgtccccaatgtactgctgctcctcaaaggatgcagggaaggggaaactttctaccacgctccagtcaatcttgggtttcagcccatcaaactcctcgcacttgagccttttgaagttgaataccaatgctgccccgattccatcgaacagcaagtctgcgtattctctgggggtgatgctctcgcttacattggcagcgtcaacattgacatccagaactttgttgccgcagtttgtccagattttatcaggagagaaccaggtggtgcgatcctcagtgtctgcaaaattctcacggggataccatccgtttgcgctgtccggcttgacgccttccagaagcggcccattatacggggaaagcggataatattggtgccgcaccggatcaaatcggccaaaggcaattttcagcagatacttgtgcttttcgctgcgcatgagcttatggggcttcacgatatgttcctctatcaaactccaaatgtactcatccacatggatggatacacgggggcggccgaatagtgtgattttgttggtgtctgtatccacattgagccagacgcgattgatttcaaccattgtcattcctcgcttttcaaaacgctccgctataaaatcggctttcccagatggcctcaaattccgcctgctctatgatgcaggcgtggaattcctcgccccagacatgggcgttcaattcctccacggtggggatcggcgtgatctcgatggcgccgtcgtaaaggtcagggatgttacgggtgcggccattcgcaaagatgtcgatggagcggagggccagccgctcattttcggtatccacttcatagaggatgaccggtggttctccctccggtgcgccctcccaaaagagcttgatgtactcggtcttgccaagataagtccgcatcgttttttcatcagcacaggccgcccggatcattttggccagcatcatcaaatcgtcgatgtattgggaatagacgcagaacacatcctcgtcggagtcgaagtgaaacagatccatgccgctgttatttttctcaaactcccggatcacgccccggaccagccgttcccagtctccgctgctgccggtcagtcccagccggcagaattcttctgtccggaacccgtcactgatcttcagcagaagggagatggcataggggtggtggggaatgagaaagaatggcgcgatctgctccggctttacccagattttgaagggcggacgcggatcgggtatccagggcaagatttcccattcgtcctccggtcggtttccgtattggcaaaggtctttcatagtgttctcctcattcgatgtcgtttcgttcttcttttacatccagtggagcgccgtccagagatgtgatctgtgacagttctgtttccgtcagattcttcaggaaaatgcagtattcatttgggtatccgcccacaaactccattttgggcatcccgatctgctgcgggtcggtaatccacaggcagggttctcccgttgcccaaaagtgagtcagcgtaagaatttggccgttgtaaattactttctgttccatcctcatttctcctgcatttgcctcagcagcttcacgatccgctcccggttctttgcggttttcatgaaggtggggagatggtcagcctgggtcattttcgctcttcccggcggcttttcccgcaggtcggcgctgagatagccgatcaaataggcaagatgttcccggttgagtgcccagaccgacttaccctggaaggaggtcaaaaaccatagttccaacctgaaataaggttctcgcccatccctgatttcgccaatatatgaaaacgcctccgctgttttatgaacttctcctgacatggttgttccacaatagggacaggccacatggagaacggaaaactgctgctttgcctcatcttcaatatccacccgatagtatctgccgcagtttttgcactggttatggacatcatagcggtagatcgtccggtcgcgggtctcctgatggccgcaactcaaacagcggaaataggcgttatcctcatccgctgtcaccacacccgcgccgtggcacttggggcatttcacctgaatgccggaggtcagggcgttgtatgcactgtatgtaaagtagggtttatcgacgattcggctcatgcgcccacacactcctttcatccgtctttctctaaataaaatccccatacgcagttggagaactctccagcagcaaagcggtggatctgcccatcaatctctacctgccagacctcgaaggtatggtcttggtgatagatggggtctttgatttttacccgcttgccggtggtttgccagtcgtagtcaaagatgttcacaccgaacaatttgcattgaccgtccgggccaaaggtttcatattcccaagccatgtgatgcctcacacttccgtgcgctgccagccgttcagccgctcctgcaccgcatcaatcttccagccttcgcccacacgcttcataagaaagcggcggtcaaagccggtgtttttctccctggtgtagatgtagagcttgtttttggtgatctgctctgcgtcaaggaattcttccccgttgtaggtgccctgggcgctgtatgagaggcccagaggtcgatagcccggacggggcttttcgctcacatatttctcccagatcgtcagcaggcggggcactgcctcagcaccttcaaacccggcctgctccatgtactgctcccactgcgtcatctcggcaaagaaagcggacagcaccctgcggcattccgccgccgcctgctcatccagctggacgggctttttggccttttcccgctggagctggaagaagtgttccatctgctcctgggtgaattgcacatgggccactggctcgatgcggttgttgccagcgatggccagcaggccctcataggtaacggcggtatggtcgatctggatgtgggagagcttggggatggaggccgcctggagcagaccggcatcatccagcccggtacggttgagcgtcagaaggtccagcttgcagccttgcagagcggacagactgctgccgtggatggcggcgttaccgtccagcagcagataacgcagcttgggcatagcggaaaaaacggggaaacaggcgtcagtgagcgcaccgtcctccacgccgaagttggccatgcttttatgtccggcaaaaggggcaagcagttcatccgtcaccggatagcttttcacatggaagcccaccagggtgtaaccggccagctgctccatgatctctgtggtcagctccggaatatcaaatttcttttctccatctaaagttaggacaccgttttcccaatccgctgttcgtgcccgttttggtaattccatagcgcgcctccttattcctgctctttgtaactggcttcaatgtcgatgaaccgcacatacacggcgcagacttcgccctttgcatcatagccgaagtagacgggatagtaaccgtcaccccagccagaggagaagatgggcaggttgcagtccgtgtccggcacggtccagttgagccagtcgccgcagtccccctgatatttggggtaggctttggcgttttcttccagaagatcgcagaacaggtcgttgtaggggtcgatgtccgggtcttcttctaaacgcttggcccagtatgccttgaaggccgcctgggtctggatgtccgcgacacagcccatcccggcgtctacgccaaagccaaaatactcgtcctctcccagttcctcgtccagatcctcgttgcccaccatgcccagctcatagcggacaagcttttcctgagaaacctccaccttgacgcaggcatagcggtcgccgtattgttcgctgggcaccacgcagatttttacgggataagttccggcggggatcgtttgaaggaacggcagagtgtcctccagttccaccagcggatcacaggcgaaaatctgcccggtggggaaatggacggtgccgatgtccagcacatccaccgccatgttcccaatcactttctctgtgaaatgggcctccaagtcatctttacaggtcaatttatccttgattgcttcgtatttgttcagccattcagttgtaggcatatcagtttcctcctgttgattctgtttcttgatgtacacactctttgagccgtcccaatagcagttcacacaccggccatcctgaaaatgatggtcacaattcgggtagccatagagaacatgggcacattctggcacagccccatcatctgtgaggagcctttgaaaaacaggcttccgcactcatcacaaagggccagttctttttctgccatagggttcaccagtcccgttcccggatggcctcctcggtgtcaatggggatgccaaaccactccagaatgtaggccacggttgccgcaatacattcccgcgccaccgtttcgatctcgctgtcgttctcgtcaaactcctcctggagatcattgatgccgcaaaccgcctcgtccagcgtttcctgcaccacttcggtgtcggtttcgccactctccagcagggcgatgaccttctgaagctcgtcctttaccttgtccaccagaaaagcaggatagtaatcgtcctgatacatctcgtccagcagcttgtaattggggtcaaatgctttcatagggattgctcctttcctcgtgtatgtcagtcacgctcagctctcatgtgtgatacagaaaatctccttgttcaaatcaaagtagattaccatcagttcgtcggtaatctccgggttaaaggacagatccagaatgaaaacttgctggttcatctcgctatccaccagactaccaaaccgcttgagcttcaaaaagtccaccatctcggcaaaggacagcttggccgggtcggttcccggaaacagttccgccgcaatatccgggcctacatcgtcccggtggaactccatgaaaaatgtcacaacgctatggtagcggctgtcctcgtccgccagcgccgctttgatggcggttttggccttctccgccaatttctccgcctcatccagcatttttcccaccgcatccatggcagcaggatcgccggtcagttcttcctctacatcgaagagaaagggtagtcccgattcctcgggaaagttgaagatttcctcgccgggtatatatgtaaaatcaatgcgtttacagttcagtttcataatgttatcctccttacccctcaatgttggcagttttgaggccctttttcaaagagccgtagaccgtcaccgcatggtcggtgaagatctcgtcgcagtcaaaccaggcggtgaagctgccgccggaggtgacggacaggctggtcatactgatccgccgggcaagttcttcctctgtgatggggtcggtttccgggttgcggggattttcctcatcctgggagagccagttgttggccagctcggtcaggttcttggctgcaaggtcccgcatggccttatcccaagtttcacagtcggccagcagcttcttggcggcgctgcgggcgcgggtccaggatggcttgctctcagcattgacctccagagaaaggctcacatcctttccgcaccactggatttcgccctcgaaggcatcatagtccttgtccagtgtcagttctcccagcacctggtcctggatcaccaccggcttgtggtactcgtccagaacggcctggagttccgggcagtcctcgtgggccttgaccacctgggagatacaccagggctgcaccaccagatcctttgcccattcttccttcatccggcggatcttcaggcggcagatctgctccttgccaaagcgtccccagcccttttcgccgttacgctcctcctcggtgaccggccaatccagccgctcctctttggtgctgaccttgccggtgtcacaaaacactatgcccagcgtcacaacggtcatttcccaaaagttgcctttccagttaaatccgcccccaatgcagcgattgatcagagcgaccacttcctgctcctcgggctcgtacatctcatagaattcttcaaacattgcgtatcctcctttacagcagtttcagcactgcggcggcaggcccggcaaactcctccgaaacctgctccaatatatcccggtaggccagcaccgcctgccaggaatagtaatagaagctgtaaaataggtcatccgggaaaacctcgtcctcctcgtagcgcatctcatcttcttcctcgtcgtattcctccgaccacaggtattcttccttcagcagatcggagaacagcggcagcgcctcggcgtgctccatctcgtccccgtcgtggaagcactggaggatgcaggagaagaagtccagcagctccccggccaggaaatgggctgcggggttctgcccgctgtctgcgagggccttctccagaattcggctcaggaacaccataccaaagggggtggcgtgccaaagggtactctggtgctccatgttggtggtgagctcgtagagggactctttgacggacgccaaatcacgcatctgctccagcactgtcaggtgtgcgggaaaatccgtcccccggccataggcggtggtgagccggtgccacgggacatccgtgaccttgagatgggtgatataggttctgttttcttctgtcatgttgttgccaccttatcccgttatctggctgcggtactccttctccagagcggtgtaccaccgttgcagcatggtttccagactggtttttcctttgcgatctgtaaaaacaaggaacttttgcagcagtctggggaacagatatttgcccgcttctgtcaggtcctgattgagatagaccatccgcaggatacggccctgccggtccagagggttctttttcagcagttccttttcaaagcagaagcgcaggaataccacattctcgtcgtagaagtcctccactacagccgcgccgatgctggtgtatgtgatgtcgtacaccaaacggctccaatcaaatttctcggcatagagaagtttcagcgccttcgcccaatgttcctccgggatcaccagcatcctgtgctgggcggtgctggagtagccgtggcaaacgggttccggctgccccagcagttcactcacactgtcggcgtagacgaagcacagctcctcatcgaacaggccaccgatgaagttgccgttgcagtacagcatataattcttggacttggccggagaataagagaggttatattcctgcgagtccaggcttttatgtaccttgttcagaaagtctattgatgtcatggctttactcctcaaactcgccctcgatcatcccgttcagataccggccgggatctgcgatgaagtcatcccatttggccagagggtggaattcctcatgctcgatatccagataccacagctttttgtccctggggctccacagcaacagatagtcgctgtagttatccatctgcaccatcagggagagcagcttcttccgtttccaggtcatctcctgcacatccatgaaggagtagagctccgcccacttcacccatttttgatccgggaactccagccgtagggagccggtcttcaagtattccaccagcttggcgggcagcttgtagggcatgagctgccggatcttttcctgctcgttgtgccattcctccggctccagagctttcaggtagtcggccagctcttgatttttgttctgcaccgccacggtgtaaggccggtcgccgtatttgtcagcaatggtgatgtcggccccctgttccacgagccagcgcaccatagggaaattgttggagcgggcggcctcggtgacaggggtggaggcgtaagggaacaccatgtccggcttgtgataattgatgtctgcccctttttccagaagcagccgggcaagtttggtattgccctcggacacagcggcccggaatgcctcgccgccaaacttctccactgtaatcccggcttgctccagcacctggatattctccgggcgcttgccccagcgtacttcctggaaggcccgctctttctgcttcgagctgagttttgcggcctgtccagcaaagagcgccaccacctccggcccacaacagcgggcggcggtgagcagcaggggctgttcctctgccagactggaatcagctccatgctccagcaggaagtggatcatgggcacatcattccgaaaaaccgcaatctccaacggcatcagcttgatgtattcgctgagctggatgggaacatctaaatccagaccgccttggagcagcgcctccagcttggaagtgtcatggtcacagatggcggcagccgtttccgggagggtctcccagcggccaatatatgcaatttggtacataagacacctactttcgttgttgtttcacttgatagggaacggtccggcccagcacccggcctttgccaacggcattggctcccgcattattttccagcgggccgtagtccacggcatccgggtagaggggctgggcatttcccaaggccggttcatcaaatgtacactcggttccgtccagaaagcatacccccagatattccgtggttcctttgacgacaaaatggggacaatatttccactcatcagactggggggagtctttcgcttgccgctccagaagatggcctccacatagagcaccgcccggttttcatctgtcccgatcatgccagtcgctccattcctgcttaatcgccaaaccgctcggcggcatcctggtaaacggtgatgcttttggcaaccttctttttctggcttcggatgcggaagtagtcccgtagaatgtgcttcagttccgggttttccaccttgcggggcagcaaactgatgaacatttcgtcgtagctttcgtacagaacaccactacggttgtaactttgccaagtcaccgtaggctttcgaccttcagggtctttggccagatcaaaaagccaccgctcatccagctccacatagcgttcaaacataaaggtcgtgtcataggacccgtagcgttcatggccccaaaagatgaacgcagtcattccatcaggccccaggcgttcatagatccagtcctccggataacagcggtaatccagcatccccagagcattgaacaggtagatttctttgggagttcccagcaggagcgaataggtttcatacacctgttccttgggctgggtgataattgctttcataaagactggaatcagccaactgccgccatagcgttcatatagttcatcggccagtgcttgtagtcgtgtatccgggtttcgaatcaaggaggcggtcagaatcaaagccggaatcttctccatttcctttggctttactttatagagccccagtccttgggaaatgtgccatgtagtgcatttgtcaccatcataaaagggggtgtgcttgagatggccgatccgttccgcattttccgccagaaaacggtacacctccaacatcttgggggaggctttgcccagcatcaaatgaaaacagaaattcatctgttccacctgtccctcttccagcggttttgtatccgcctcatccaacagcagggagagggttttcaggatgactggggcaatctgctccgatacacaatccgagcaggcatccgacatgatatggctgcccatccatttgcccttgaccagcttggcccacagtggggcagcaggggcatactccagctgcgccaaagccttttgagcagccgttttgcacttgcccttttctgtattcacaagctggagaaacagttcgccgtttgcttcctctttgcccagcgccaaaatggcctgttctcgctttacacccttgggaggcagttgttctaaagtcatcgtagtattcatagcgtctcatcctcgttcataagttgtccctgtacctctctgggcaggtcgttccacaaaatatcgtatgtaaaatcccgaatctccgggtaacactcccgtgcggtcttttccgcaatatctctattcaggtagtgcatctcttggtggaaaaaccagttgagtttttccatcagccgatagagtcggatttgttcttcttgggtcatgggattgctcctcctatttcaacttcagcacaaatccccagatactcaccacaatcaggaggacacccagcagaaagaaaaccacacgccggtatcctctgctgtgtcgatgagcatcccgcgtaccagtggggtcgcagagccagttccagttgcggatcgccccaattaaaatcacggccccgatgagcaccgaggcaatgtaccaatgctcttgcaaaaatgctgtgatctgttcactgttcatttacagataccccctttttttacatcatcgggagtttcctttcggatgatttcctcccgctcttttaaatccagctccagagctttttcctcctccagatattcctcgcagtcccgaaccagcttttgagcggctggggcatccgggccagggccagccagcattttgcgtattcataggcggtggctgcggagcggtatgccatcaggcaagaatagcccatccgggagttccagtaagggtcgttctctccctgggtgcggacggactccagcagatcaatggcgtgtcggatgagatccccgtccacttcaccgtcggtcccatgcactccatgatctcccagaaccgccagattgctgtaagcccgactcagcttgacggtcagcaaatagccccgctcctgttccgggatagcttcgatggcctggatgcactgggaatactcgtccttgctattccactgttcgagttgctccagcagctctatttcttctgtccgattcatcgtttcaccgccttttctgtgttatcccttgccttttttgaagtgtccactgcctcgccaggtgttgaccacacaggtgaagatctgaccacagtgcttgcaccgaatcatgtgagccataatttcgtctgcccatccatcctcagtctttacctcctccagcgggcaggtggactcctctgccatcagttcaaattggccttgtcccaccaactgctgaatataagcaatacaggccaggtagtccttgggcgcatcaaattttctccatgtttgaatgtttcggtagtgctcacacatatagcagcgtctcctctcaggtctgctgatgctgcatggatatgatttggcagtctggacagaattccacatagagcgtgccctccgcacagtcaaacaccgtatcccactgaatctgcgccagatacttcatgggcttaccgcagtgaggacaggtcgtatattccgcatcctgaacccagttggcaaagccgccgatggtattcacatcctggcaggccgcgccgtaaaacaggggcacaggcgcttcgcccagcacaaagggattttccgtgagggccttgtactcctcgggactgacatagcaatccgtcttctccgcgccgtcaaatagctcagagggaaagacctccacgccgccatccagggtaaaccggttgaaggcggggcctttgaggaatcccacgcagctggggcagcaggtggcagtcaggataccatccaaccccagaaatttcagacgctcatcccggccgtccagcaccaatatatccaccatgcgtccgccgcagtggggacaggtatcttcccgttctcggccaatgcagacgggagatttctcgccagtggttcccttgaccataggatagcaggtgtcgaagttgagttggattttctggccctccttgtcgaaggtccagcctccgatctgcgcatagctggatgggtctacatagaggcccttgcgccagggccggggatttcgctccagctccagcagagtctccattgccttgtcatctccttgcatagcaaggcaactcatcaggttggaggccgcgctggaattttccgcggacaacagcgcatgaatcagaccatctcgcacatcggcgggagcgtgataatagatctcacagggccaaaacacctctgcggccagtgccatccgctgaatctctggggtgatgacatcatggtagccaagcagctgccaaaagtcggcgaactctgggtcctccatatcagccagcctctggatgttctgtatcaagtttctttgtttttcgacaatttgttccggcgtccaggccagagcagcttgccgttcttgctcgcacttacatttccaacacaatccctcataacccaatggggttccacagctggggcaggtatatttcagactcatgttctcatactcctttcaggcaataaaaaagccccacgccgcactgtcataaagacaggctgacgcaggacatgaagaagccgcgttgaaggagccgcatccaccagcggatgtagtttcttcaacaaccaaaatatttttttcgtatcttaaagcagcaaattgctgtccaatatatttgttcatagcggcaccatttgttctgagcgtagttttatatcttattatatcacagcactccttcaatgaaaatattttgttggaaatgccaatgaaaaatttttgtgaatttgttaagtcgtaggggttgttatttccatagtatctggatggatcagagtgattgcttttccgtttcgtaaggcataattgactgtctgtgctgtgcctgagcgcagctttttctgattatcaaacacaccgatgatgtactctgcatgatcgaccatataataatttctttttttataactggaaacatccgcagaatgtgaaataacaatagaatcgtttgcgttttggatcagctttttcaatctatgtctactctgatccggccatttagagtcatagccgatgaagggaattacaacgataattttaatatcctcgtatcctgtttgtgctctcaatgttagaagctgttctccagcccacatatccacaccaagagcaccgccgacaaaaaaagtacggacaaatttctcgtcatggagtatgcgaaactgctccaggagacattctttcagcttttggcatagagaatcttcctcattatatccaaagcaaaatcttgttggtctgtggccggtaatggcacaggcatactgattcatacaaatcacccttgataactgccttgattacgcatataaagcaaaaataacgcaaataataatgcgtataaaggttatattacaaaattataacacaatacatacgaagtatcaagaattgctttctgctatgctaaaagagcagagaggtgagcgtatggacgaagaatttatccgcaatcggatcacagaattgcgattgaaaaaaggtgtttcagaatatcagatgagcatggagttagggcagaacagaagctatattcaggcgatttcctctgggcgttctatgccgtctatgaagcagttcctcaacatctgtgagtattttgaaatcacaccgcttcaattttttgatgcacaggaaaataaccctcagcttatcaagaaggctttggacggaatgagaaagatgtcagatgacgatttgattatgctgattggttttataagtcgcttaaacacagaaaactaacgataggaggcagtaagcgtcccgtcgttagtttttcattttatgcgcagcatattgtggcaagcaatgcttgtggctatccatttcgccacaaactgcttgttgagggcagtgcccccaagcccctttgaacacagaatttcattctgtggctgcgcgttctgcgaacgcttttgaccaggaccagcttatcgctggccgtggtctttttctttttcaacatcctgttctacctccattttcagcacccgatccacattggcctttgccgttaaaagctcccgcatttcctcacgggaacgccggtactcggcataggtctttttcttttcttccagcaatttcgcatactccgtctgcaactctttgaccttgggtaacttcttgactcccatttcatcaaaggcattcttagcagcctggtggagcagaatttcttcctcatgttcttcccggaatttcttagaatatcctgccttgcggtatgccacatagacctcacgggtcttggcataatttacgatgtgcgtacgcaaaacagcaatctctgccatgcgcttttctgccgctttgatctgtgccgaaagttcattgtgatgtgccgtggcagccgcagccttttcttccaaaaccgcatactccagcagattgttctctgacaggtaattcatggtctgtgccatttgcttcagattgaaaaccttagcccatcgagcatagccagcaccttttcctgcctgcaattttgcttgaatgtccaccagcagattgaccttcggcagctctgcctgtgcgaccactttctttcgtggggtatgcgttttcttcccagagagaactgcctgcaaatcttccaatccatatccttcgcccaggctgtccattcgggcggctttctcccaaccggggagcttcaggcgatatgattttccgcgctttgatacctcacagccggactcttgcagcagcctcagcagctcctcaaagtcagcaggactttgtgataatgcattatcaatcgccacacgaagcagctctcggtgagagggctttgcctgatcgcccagccatttgttatagctctttccgtgaggtttcgggttctctacaatagacagtccgttttcaatgcagatggtgtcgctcaactgacggaccgccttggtgctgccccaaaagtttcggaatttccggtcatattctaagctgaccgatgaccagataatgtgattgtgaatgtgcgatttgtctatatgagtgcagaccacaaaggcatgattgcccttggtaaaacgcttggcaaaatccacacccagccggttcgcttcttccggagtgatctcaccggggcggaacgactggcgcacatgataggcaatcacatcatccgcacctcgcactcgtccggtagcggcaatgtactgccgctttgccagaagaaactctgcatccgcagtccggctgtcacacgcatagccggtaatgagtctgccgttatctgttttctttgggttggccacatagtcgatgatgtcactgatcgcccgactttctgtgcggcccttgccgacatgaagcggcatgattctcgtggttgccataggtcagacctccttcccgaaaagaaaacggcctgccatagcagaccgctttcactattctataaaactttcttcatcgaaaaaattgaactcatcatcttctaagtgtcttggtggaaatctcatttcatattgctcttgcgccaatgcacggacatcaggccgcctatcctttagtcgatttttcagccagggcaactgttctttcgatagcctccatggaagattcaaaagacgattcagtgtcatcagttcagcctgcttttctgctggtagcgaagcacaggatttacaaatgtgggatgcatgacctttgcctgaaaatttttcgttggctttgtattcaccacaaactttacaatagtgtccatgctttttcataagctgatgcccttctcgcaaagaacatataacctgcgaattgctttcataatcacattccattccaaatcagaagcataagaaaactttttgcggtatgcctcccaaagtttttgcataaccgaatcattttccacttcgtcaaaaacttcttcagcccggttaagatacttctccgatccccgtttatgagcagttgccagaagcgcatcatgtaaaattttcgggttcagcgtggttccatgcagctgttctaaaatgtaaatatcgtagaaatctctcatgcgggtattggttgtggttctggtaataatggtttccagtttttctgccagcacagtttctaaattataagcccaaatatcaatggagcgatcttccagcataagtttgaatgaataccgaacctctcttggagtgattgcatctcccgtagaaatatcaattttcaaaggggtcactacaccatcgaatgttgtactcatgctgacacgaatccccggatactctgcttcatccataatctccgaaatacttttcagctgaaatttaacaccatcatcaatcggaacagttacgattgatgaaattagattctcaatatcctccacattaacattagctccttttatggttgcatccaaatccatcgtagagcgggcatccaatccaaccatagccgctaccaacataccacccttcaagataaacttatcacgatactcagaaagagaaatacgctccaaaaaacgctccatcatgtagttcctcattaaaatctgagcatctgcggatttttctctggaaaggtttcgtattaaatctttaagctgccttgctgtttttatcataaaagtacctccaaatactgtcgtaaaattttttccaccttgaacatcccagcatattgcattaaagctcgcaggttcttatcttttctacgggcatacgctttcagtgctccctgaaaggtctgaatttcaattctgctacggcttctgagcaaatcacagatcgttcgctccatatcataaaccggcacagtatgcccgaacggagttttcgctgttgtaagtcctacatcatgtaagtctgctttaatcgtaaaaacttgaatgccttctgctttcattttgcttggattgcatccagttttgaccgtaactgtatattctattggttcacggtctgtcagatcgtgaaaaaataaagctgtttcatgtgaaaatactgcttgttcaaatcgcaaatgaagcagatacatggcatccacccaggaatctttggacagataaatcccatgtgcgactctatccaaatctcgtgaacgcacataatcataaaataccggctttgaaattccagaagatacgacctgcgatgttcgcagcattccttcttgttctgttagcatctgatccagctgttcaaattgtcccatcatatcacttcctttcgcactaatattatacgcaatattagttcaaaagtaaagtcgtggatatatagtttctctttccaaatttaacagacggtgtttggcattttgtggcttttcgtattttttatccataaacccaatcctgaatggcaaatttcaaactctgcaccttacccatcagccagattgcagccagcggcagccccatagggctaatcaaaaatgccacaaccagcaaaatcacaccattctgcggggaataggtaataagcacagccacgccaagcagagcaattacagtgctgagcagaccaagcaccagaccggatatgtagatcagccccgtgcagagccagacaaaaagcgtcagcaccaaaatgaccggtgcagttataatcatcaaaagtcctttcaaaatcttcatgtcatttcctccttgcagcgttcttggtatcttttctaatcatattatccggcatgggcaggcaaaagacaaggataccggcaaaaagaaaaagcggagggaggtgcggcgaagaaacgccgttcctccctccgcaaatggagtatctatccctgttataaaagtttggaaagctgggtaaggatttcctctacgccctcccataactgttcctgccgctgggatatatcctccaagtcagcatcataaacccgcccagtctcatgcactttacgggtcagctggtttaagttgttgctgcttcggcgcatcagggaaacaagctccttcagctccggtagctccagcttgactacatacccatccagcgccatttttcttagataggcttcacggttggaggttccaaactgagacattttttgctcaatcacagcaagctcctccgctgaaactctaaagtttaattgcatatcccgcttacgctttgccatggttatcgctccggcacccgtttcttcggggcggcaggcttatgggcaggcagctcctgtttgagcttatcccgtactgaggggcgggacagttgcgttttttctccctgagtacggctacgctgctgttcttctcgcaccagatcaataaaaccatccagcacagcagggtggctgttcaggacataaccacaacggacggtttcggggttctcgttgggaatggtcttagcccattccttattgcgtcgggagtagcgcccatcccagtcctgaagctgggcggtgttggccagaaccagagccacacgctccatgccataggtctcaatcacaccctttgccgcatcgtgactgagatacattccgtcgaagtgttcccgcaccgccgcttcaatggactccttgcattggagatttgcattgttggaagcccggtactgctccagctccccatgttctctcgcataggcggcagagtggggatagaccggtgttgttcgcagttcctctttagctctgcacacatcgtcggcacggttctcaatattgtcccggatctcatccatatagccagtctccagcttttcaaaataacggtacacatcttccagcggcgaaggagattccaaaagcgcctctgcctgggcatcggtcagctccagttcctccatcgccatcacgatgtcctcacggaccgtgtactcataggtgtggtgcaggatttcttccgggggctggcttttcagccagtccctgtatttgtcctgctcggcagccatcttttcataaagggctgtatttagatcgttggtattcatgttatcgtacctcctcgtgttgttttggtttcttttcaaggctgcgtggcggcacagggcgtttcaggctgtccagcaccgaagtccgtgtgcttttggcaacaacagtctcggcgtgtgcctgtccctttccgtcgatgttgagcaaagtatccagctccaccagacgggcatttttgcttcgcagttcttcttcataaaggaatggctttccgacttcctcctttgcggcagcctgctgctgatagaggttatccagctgggcctttgccgcctccaggcgctggggcatctgggcgagggcattgtcgatacgggtaagatttccgcgagggtctgtaccaagggttgcccggtgggtcatctgtcctttcagcaggagcgtatactcctgtttccaagcggaaaattccacggatatggcatagccccggtaactgccaatctgcaccggatcggaggttttgacctccttgcaggcatccaaaagggcagcaccggcgttctccttatcggtcagcagatctccacgaatctccataccggcaaagccgtcctccgggtgcgggtgcgctgccaaaacctctaagtcagattcaaagcctttgataaagcccttgtgcttttcaatctcctccgggaaatatttgagcagctgatcctccagacgatattgcttgctctggtggtcggctttcattagcttcaggcgggatacctccacatccaaatccatacgctccttgatgcggggatctccggcgcacagggctttgatctcggcaaaggaaagcgccgtttcgtccacatcatcgcaggaacgcaccggcgatttagaagtcatgatctgactgatgaatttttgcttattctccaccgtctgccagaggtatgcgtcaaaggttccttcggtcacatagcggtacacatggacaaggggattctggttgccctgtcgctcaatacggcccttgcgctgggcaaggtctcccggtctccacggacagtccaggtcatgaagtgccaccagacggtcctgcacattggtgcctgcgcccatcttggcggtgctgcccaaaaggacacgcacctgaccggtacggactttagagaacaactcctttttccgcacttcggtgttggcttcatggataaaagcgatctggtcggcaggcatcccctgagcaatgagtttctgacgaatatcgtcatataccgtaaagaccggttcctgctccggcagaggcacagcgcc

(The sequence listing continues in the following parts.)
